United States Patent Application Publication US 2022/0256795 A1 - sequence listing, part 5

SEQ ID NO: 4 - DNA, 3771400 bp, Glycine tomentella (residues 1-1,885,700 of 3,771,400)
  misc_feature (1552)..(3454): n is a, c, g, or t
  misc_feature (5653)..(7177): n is a, c, g, or t
  misc_feature (14042)..(14531): n is a, c, g, or t
  misc_feature (16332)..(17113): n is a, c, g, or t
  misc_feature (33074)..(33405): n is a, c, g, or t
  misc_feature (38044)..(38594): n is a, c, g, or t
  misc_feature (40206)..(42493): n is a, c, g, or t
  misc_feature (43200)..(44413): n is a, c, g, or t
  misc_feature (51635)..(52051): n is a, c, g, or t
  misc_feature (67934)..(68085): n is a, c, g, or t
  misc_feature (68641)..(69760): n is a, c, g, or t
  misc_feature (74240)..(74530): n is a, c, g, or t
  misc_feature (80406)..(80456): n is a, c, g, or t
  misc_feature (82203)..(84017): n is a, c, g, or t
  misc_feature (84984)..(85167): n is a, c, g, or t
  misc_feature (91340)..(91834): n is a, c, g, or t
  misc_feature (92133)..(92142): n is a, c, g, or t
  misc_feature (92450)..(92528): n is a, c, g, or t
  misc_feature (95257)..(95266): n is a, c, g, or t
  misc_feature (103582)..(104192): n is a, c, g, or t
  misc_feature (106719)..(107424): n is a, c, g, or t
  misc_feature (122202)..(122728): n is a, c, g, or t
  misc_feature (148235)..(148250): n is a, c, g, or t
  misc_feature (163693)..(163762): n is a, c, g, or t
  misc_feature (207647)..(207911): n is a, c, g, or t
  misc_feature (209347)..(209727): n is a, c, g, or t
  misc_feature (212535)..(213537): n is a, c, g, or t
  misc_feature (220477)..(220670): n is a, c, g, or t
  misc_feature (237198)..(237344): n is a, c, g, or t
  misc_feature (263205)..(264433): n is a, c, g, or t
  misc_feature (272347)..(273006): n is a, c, g, or t
  misc_feature (291557)..(292033): n is a, c, g, or t
  misc_feature (308918)..(309077): n is a, c, g, or t
  misc_feature (310812)..(311177): n is a, c, g, or t
  misc_feature (315486)..(315495): n is a, c, g, or t
  misc_feature (319196)..(319597): n is a, c, g, or t
  misc_feature (341077)..(342403): n is a, c, g, or t
  misc_feature (368260)..(369106): n is a, c, g, or t
  misc_feature (371417)..(373819): n is a, c, g, or t
  misc_feature (374674)..(375021): n is a, c, g, or t
  misc_feature (377553)..(378329): n is a, c, g, or t
  misc_feature (389500)..(390095): n is a, c, g, or t
  misc_feature (391944)..(392048): n is a, c, g, or t
  misc_feature (397402)..(398531): n is a, c, g, or t
  misc_feature (407728)..(408061): n is a, c, g, or t
  misc_feature (411173)..(411801): n is a, c, g, or t
  misc_feature (419683)..(421244): n is a, c, g, or t
  misc_feature (425779)..(426508): n is a, c, g, or t
  misc_feature (432041)..(432475): n is a, c, g, or t
  misc_feature (433860)..(434851): n is a, c, g, or t
  misc_feature (441668)..(442812): n is a, c, g, or t
  misc_feature (457026)..(458248): n is a, c, g, or t
  misc_feature (461651)..(463395): n is a, c, g, or t
  misc_feature (465493)..(465647): n is a, c, g, or t
  misc_feature (466943)..(468253): n is a, c, g, or t
  misc_feature (472230)..(472837): n is a, c, g, or t
  misc_feature (487665)..(487949): n is a, c, g, or t
  misc_feature (488468)..(488587): n is a, c, g, or t
  misc_feature (499864)..(500369): n is a, c, g, or t
  misc_feature (509328)..(510577): n is a, c, g, or t
  misc_feature (514796)..(515221): n is a, c, g, or t
  misc_feature (525608)..(526358): n is a, c, g, or t
  misc_feature (547010)..(547760): n is a, c, g, or t
  misc_feature (558919)..(559850): n is a, c, g, or t
  misc_feature (566283)..(567089): n is a, c, g, or t
  misc_feature (569070)..(569079): n is a, c, g, or t
  misc_feature (571674)..(571975): n is a, c, g, or t
  misc_feature (572737)..(575746): n is a, c, g, or t
  misc_feature (576963)..(577586): n is a, c, g, or t
  misc_feature (584528)..(584983): n is a, c, g, or t
  misc_feature (605272)..(605579): n is a, c, g, or t
  misc_feature (609394)..(610165): n is a, c, g, or t
  misc_feature (617896)..(618686): n is a, c, g, or t
  misc_feature (625074)..(626337): n is a, c, g, or t
  misc_feature (627258)..(627267): n is a, c, g, or t
  misc_feature (663437)..(663446): n is a, c, g, or t
  misc_feature (677239)..(678364): n is a, c, g, or t
  misc_feature (691304)..(691622): n is a, c, g, or t
  misc_feature (694593)..(695408): n is a, c, g, or t
  misc_feature (696667)..(699377): n is a, c, g, or t
  misc_feature (700104)..(701196): n is a, c, g, or t
  misc_feature (705689)..(706903): n is a, c, g, or t
  misc_feature (709805)..(710830): n is a, c, g, or t
  misc_feature (711485)..(711664): n is a, c, g, or t
  misc_feature (715293)..(716133): n is a, c, g, or t
  misc_feature (720192)..(720375): n is a, c, g, or t
  misc_feature (727091)..(728152): n is a, c, g, or t
  misc_feature (728581)..(728802): n is a, c, g, or t
  misc_feature (730564)..(731565): n is a, c, g, or t
  misc_feature (732775)..(735305): n is a, c, g, or t
  misc_feature (736276)..(739104): n is a, c, g, or t
  misc_feature (740504)..(740683): n is a, c, g, or t
  misc_feature (745824)..(745833): n is a, c, g, or t
  misc_feature (746627)..(747147): n is a, c, g, or t
  misc_feature (751305)..(751913): n is a, c, g, or t
  misc_feature (756586)..(757020): n is a, c, g, or t
  misc_feature (757601)..(758834): n is a, c, g, or t
  misc_feature (768414)..(770335): n is a, c, g, or t
  misc_feature (771642)..(772619): n is a, c, g, or t
  misc_feature (774210)..(774219): n is a, c, g, or t
  misc_feature (778042)..(782454): n is a, c, g, or t
  misc_feature (789571)..(790087): n is a, c, g, or t
  misc_feature (792649)..(792930): n is a, c, g, or t
  misc_feature (799641)..(800498): n is a, c, g, or t
  misc_feature (808221)..(809554): n is a, c, g, or t
  misc_feature (821576)..(821784): n is a, c, g, or t
  misc_feature (828575)..(829354): n is a, c, g, or t
  misc_feature (839949)..(840264): n is a, c, g, or t
  misc_feature (842111)..(842655): n is a, c, g, or t
  misc_feature (847994)..(848495): n is a, c, g, or t
  misc_feature (853919)..(854241): n is a, c, g, or t
  misc_feature (857078)..(857505): n is a, c, g, or t
  misc_feature (868382)..(869694): n is a, c, g, or t
  misc_feature (880598)..(881115): n is a, c, g, or t
  misc_feature (895058)..(895306): n is a, c, g, or t
  misc_feature (900259)..(900390): n is a, c, g, or t
  misc_feature (902518)..(903087): n is a, c, g, or t
  misc_feature (907240)..(907665): n is a, c, g, or t
  misc_feature (907803)..(908436): n is a, c, g, or t
  misc_feature (911740)..(912234): n is a, c, g, or t
  misc_feature (917770)..(920015): n is a, c, g, or t
  misc_feature (921886)..(924214): n is a, c, g, or t
  misc_feature (935909)..(936079): n is a, c, g, or t
  misc_feature (940572)..(941300): n is a, c, g, or t
  misc_feature (964919)..(965552): n is a, c, g, or t
  misc_feature (968461)..(968470): n is a, c, g, or t
  misc_feature (983074)..(984200): n is a, c, g, or t
  misc_feature (987787)..(987934): n is a, c, g, or t
  misc_feature (988886)..(989540): n is a, c, g, or t
  misc_feature (996469)..(996923): n is a, c, g, or t
  misc_feature (1002811)..(1003416): n is a, c, g, or t
  misc_feature (1013241)..(1013708): n is a, c, g, or t
  misc_feature (1017110)..(1018039): n is a, c, g, or t
  misc_feature (1019869)..(1023158): n is a, c, g, or t
  misc_feature (1024742)..(1026284): n is a, c, g, or t
  misc_feature (1027236)..(1029131): n is a, c, g, or t
  misc_feature (1030180)..(1031934): n is a, c, g, or t
  misc_feature (1042028)..(1042427): n is a, c, g, or t
  misc_feature (1046951)..(1047364): n is a, c, g, or t
  misc_feature (1063230)..(1064182): n is a, c, g, or t
  misc_feature (1080876)..(1081350): n is a, c, g, or t
  misc_feature (1083820)..(1083829): n is a, c, g, or t
  misc_feature (1086180)..(1086431): n is a, c, g, or t
  misc_feature (1093782)..(1094300): n is a, c, g, or t
  misc_feature (1097960)..(1098927): n is a, c, g, or t
  misc_feature (1105724)..(1106919): n is a, c, g, or t
  misc_feature (1115468)..(1115940): n is a, c, g, or t
  misc_feature (1131661)..(1131670): n is a, c, g, or t
  misc_feature (1133112)..(1133889): n is a, c, g, or t
  misc_feature (1136881)..(1138569): n is a, c, g, or t
  misc_feature (1139196)..(1140233): n is a, c, g, or t
  misc_feature (1147636)..(1148052): n is a, c, g, or t
  misc_feature (1155767)..(1155831): n is a, c, g, or t
  misc_feature (1156479)..(1156488): n is a, c, g, or t
  misc_feature (1157626)..(1157853): n is a, c, g, or t
  misc_feature (1163645)..(1163724): n is a, c, g, or t
  misc_feature (1176822)..(1177249): n is a, c, g, or t
  misc_feature (1179638)..(1180437): n is a, c, g, or t
  misc_feature (1182985)..(1183421): n is a, c, g, or t
  misc_feature (1184691)..(1185126): n is a, c, g, or t
  misc_feature (1188184)..(1188439): n is a, c, g, or t
  misc_feature (1198579)..(1200299): n is a, c, g, or t
  misc_feature (1209290)..(1210016): n is a, c, g, or t
  misc_feature (1217134)..(1217372): n is a, c, g, or t
  misc_feature (1219409)..(1220516): n is a, c, g, or t
  misc_feature (1222789)..(1223682): n is a, c, g, or t
  misc_feature (1224108)..(1224332): n is a, c, g, or t
  misc_feature (1226416)..(1227831): n is a, c, g, or t
  misc_feature (1228949)..(1228958): n is a, c, g, or t
  misc_feature (1232011)..(1232964): n is a, c, g, or t
  misc_feature (1239029)..(1239209): n is a, c, g, or t
  misc_feature (1239901)..(1240081): n is a, c, g, or t
  misc_feature (1266517)..(1266647): n is a, c, g, or t
  misc_feature (1274678)..(1275787): n is a, c, g, or t
  misc_feature (1276963)..(1277467): n is a, c, g, or t
  misc_feature (1282764)..(1283026): n is a, c, g, or t
  misc_feature (1286249)..(1286392): n is a, c, g, or t
  misc_feature (1291006)..(1293033): n is a, c, g, or t
  misc_feature (1294636)..(1296850): n is a, c, g, or t
  misc_feature (1340024)..(1341086): n is a, c, g, or t
  misc_feature (1345867)..(1345876): n is a, c, g, or t
  misc_feature (1352172)..(1352699): n is a, c, g, or t
  misc_feature (1367276)..(1367673): n is a, c, g, or t
  misc_feature (1371833)..(1372349): n is a, c, g, or t
  misc_feature (1373554)..(1374036): n is a, c, g, or t
  misc_feature (1376710)..(1377067): n is a, c, g, or t
  misc_feature (1391867)..(1392719): n is a, c, g, or t
  misc_feature (1393976)..(1393985): n is a, c, g, or t
  misc_feature (1414361)..(1414516): n is a, c, g, or t
  misc_feature (1414966)..(1417052): n is a, c, g, or t
  misc_feature (1449044)..(1449297): n is a, c, g, or t
  misc_feature (1460391)..(1461402): n is a, c, g, or t
  misc_feature (1463369)..(1463697): n is a, c, g, or t
  misc_feature (1466381)..(1469323): n is a, c, g, or t
  misc_feature (1470174)..(1472353): n is a, c, g, or t
  misc_feature (1487675)..(1488988): n is a, c, g, or t
  misc_feature (1499336)..(1500876): n is a, c, g, or t
  misc_feature (1503393)..(1504152): n is a, c, g, or t
  misc_feature (1508406)..(1508643): n is a, c, g, or t
  misc_feature (1513395)..(1513810): n is a, c, g, or t
  misc_feature (1543858)..(1544389): n is a, c, g, or t
  misc_feature (1545470)..(1545816): n is a, c, g, or t
  misc_feature (1549517)..(1550463): n is a, c, g, or t
  misc_feature (1552771)..(1552909): n is a, c, g, or t
  misc_feature (1562145)..(1562216): n is a, c, g, or t
  misc_feature (1569535)..(1569674): n is a, c, g, or t
  misc_feature (1572803)..(1572882): n is a, c, g, or t
  misc_feature (1573660)..(1574232): n is a, c, g, or t
  misc_feature (1579414)..(1579604): n is a, c, g, or t
  misc_feature (1585948)..(1586528): n is a, c, g, or t
  misc_feature (1625423)..(1625912): n is a, c, g, or t
  misc_feature (1634103)..(1635046): n is a, c, g, or t
  misc_feature (1646482)..(1646902): n is a, c, g, or t
  misc_feature (1652680)..(1653135): n is a, c, g, or t
  misc_feature (1657133)..(1658011): n is a, c, g, or t
  misc_feature (1663478)..(1664117): n is a, c, g, or t
  misc_feature (1667209)..(1667500): n is a, c, g, or t
  misc_feature (1676409)..(1676890): n is a, c, g, or t
  misc_feature (1677745)..(1677754): n is a, c, g, or t
  misc_feature (1684135)..(1685348): n is a, c, g, or t
  misc_feature (1691563)..(1693991): n is a, c, g, or t
  misc_feature (1697678)..(1698412): n is a, c, g, or t
  misc_feature (1706706)..(1707095): n is a, c, g, or t
  misc_feature (1710494)..(1712169): n is a, c, g, or t
  misc_feature (1723360)..(1724145): n is a, c, g, or t
  misc_feature (1726103)..(1726381): n is a, c, g, or t
  misc_feature (1727526)..(1727704): n is a, c, g, or t
  misc_feature (1734141)..(1734781): n is a, c, g, or t
  misc_feature (1735588)..(1736135): n is a, c, g, or t
  misc_feature (1738742)..(1739914): n is a, c, g, or t
  misc_feature (1740504)..(1740720): n is a, c, g, or t
  misc_feature (1742500)..(1743309): n is a, c, g, or t
  misc_feature (1754575)..(1754888): n is a, c, g, or t
  misc_feature (1768741)..(1769506): n is a, c, g, or t
  misc_feature (1771264)..(1771273): n is a, c, g, or t
  misc_feature (1772411)..(1774093): n is a, c, g, or t
  misc_feature (1787517)..(1787970): n is a, c, g, or t
  misc_feature (1814043)..(1814055): n is a, c, g, or t
  misc_feature (1819132)..(1819778): n is a, c, g, or t
  misc_feature (1828359)..(1829360): n is a, c, g, or t
  misc_feature (1832992)..(1833553): n is a, c, g, or t
  misc_feature (1849342)..(1849867): n is a, c, g, or t
  misc_feature (1853584)..(1854274): n is a, c, g, or t
  misc_feature (1855729)..(1856447): n is a, c, g, or t
  misc_feature (1862844)..(1863061): n is a, c, g, or t
  misc_feature (1872183)..(1872337): n is a, c, g, or t
  misc_feature (1880017)..(1880526): n is a, c, g, or t
  misc_feature (1882083)..(1882092): n is a, c, g, or t
  misc_feature (1883604)..(1883874): n is a, c, g, or t
  misc_feature (1900385)..(1901610): n is a, c, g, or t
  misc_feature (1913375)..(1913424): n is a, c, g, or t
  misc_feature (1919702)..(1920180): n is a, c, g, or t
  misc_feature (1927448)..(1927824): n is a, c, g, or t
  misc_feature (1935739)..(1935865): n is a, c, g, or t
  misc_feature (1939886)..(1940005): n is a, c, g, or t
  misc_feature (1945223)..(1945306): n is a, c, g, or t
  misc_feature (1949239)..(1949380): n is a, c, g, or t
  misc_feature (1951086)..(1952331): n is a, c, g, or t
  misc_feature (1959556)..(1959767): n is a, c, g, or t
  misc_feature (1966186)..(1967076): n is a, c, g, or t
  misc_feature (1969444)..(1969453): n is a, c, g, or t
  misc_feature (1972147)..(1973800): n is a, c, g, or t
  misc_feature (1977712)..(1977990): n is a, c, g, or t
  misc_feature (1986366)..(1986926): n is a, c, g, or t
  misc_feature (1989195)..(1989819): n is a, c, g, or t
  misc_feature (1992213)..(1993822): n is a, c, g, or t
  misc_feature (1999731)..(2001678): n is a, c, g, or t
  misc_feature (2025860)..(2026509): n is a, c, g, or t
  misc_feature (2032735)..(2033774): n is a, c, g, or t
  misc_feature (2036117)..(2036452): n is a, c, g, or t
  misc_feature (2039533)..(2041503): n is a, c, g, or t
  misc_feature (2043074)..(2043586): n is a, c, g, or t
  misc_feature (2044687)..(2045042): n is a, c, g, or t
  misc_feature (2045925)..(2046367): n is a, c, g, or t
  misc_feature (2048901)..(2049614): n is a, c, g, or t
  misc_feature (2053761)..(2054237): n is a, c, g, or t
  misc_feature (2055053)..(2055465): n is a, c, g, or t
  misc_feature (2058761)..(2060837): n is a, c, g, or t
  misc_feature (2073049)..(2073410): n is a, c, g, or t
  misc_feature (2074755)..(2074817): n is a, c, g, or t
  misc_feature (2076668)..(2077648): n is a, c, g, or t
  misc_feature (2078104)..(2079057): n is a, c, g, or t
  misc_feature (2080934)..(2082369): n is a, c, g, or t
  misc_feature (2090301)..(2090970): n is a, c, g, or t
  misc_feature (2096234)..(2096801): n is a, c, g, or t
  misc_feature (2099631)..(2099787): n is a, c, g, or t
  misc_feature (2104744)..(2105927): n is a, c, g, or t
  misc_feature (2107503)..(2107737): n is a, c, g, or t
  misc_feature (2110074)..(2110548): n is a, c, g, or t
  misc_feature (2116376)..(2116851): n is a, c, g, or t
  misc_feature (2122727)..(2123200): n is a, c, g, or t
  misc_feature (2129083)..(2130212): n is a, c, g, or t
  misc_feature (2135588)..(2136039): n is a, c, g, or t
  misc_feature (2137401)..(2139656): n is a, c, g, or t
  misc_feature (2152878)..(2153599): n is a, c, g, or t
  misc_feature (2155897)..(2156812): n is a, c, g, or t
  misc_feature (2162239)..(2162394): n is a, c, g, or t
  misc_feature (2170226)..(2170235): n is a, c, g, or t
  misc_feature (2183827)..(2184016): n is a, c, g, or t
  misc_feature (2192039)..(2192713): n is a, c, g, or t
  misc_feature (2195551)..(2195706): n is a, c, g, or t
  misc_feature (2200205)..(2200501): n is a, c, g, or t
  misc_feature (2204112)..(2204121): n is a, c, g, or t
  misc_feature (2207771)..(2207780): n is a, c, g, or t
  misc_feature (2208711)..(2208991): n is a, c, g, or t
  misc_feature (2215532)..(2216729): n is a, c, g, or t
  misc_feature (2221370)..(2222103): n is a, c, g, or t
  misc_feature (2227574)..(2228255): n is a, c, g, or t
  misc_feature (2235787)..(2236653): n is a, c, g, or t
  misc_feature (2237005)..(2237375): n is a, c, g, or t
  misc_feature (2238525)..(2240991): n is a, c, g, or t
  misc_feature (2242217)..(2242320): n is a, c, g, or t
  misc_feature (2243184)..(2245275): n is a, c, g, or t
  misc_feature (2251968)..(2252963): n is a, c, g, or t
  misc_feature (2263612)..(2265687): n is a, c, g, or t
  misc_feature (2266385)..(2267404): n is a, c, g, or t
  misc_feature (2271251)..(2272239): n is a, c, g, or t
  misc_feature (2273905)..(2274980): n is a, c, g, or t
  misc_feature (2287925)..(2288412): n is a, c, g, or t
  misc_feature (2288991)..(2289130): n is a, c, g, or t
  misc_feature (2290990)..(2291540): n is a, c, g, or t
  misc_feature (2298060)..(2298953): n is a, c, g, or t
  misc_feature (2305635)..(2305855): n is a, c, g, or t
  misc_feature (2311127)..(2312575): n is a, c, g, or t
  misc_feature (2321414)..(2322012): n is a, c, g, or t
  misc_feature (2323689)..(2323859): n is a, c, g, or t
  misc_feature (2334806)..(2335819): n is a, c, g, or t
  misc_feature (2336155)..(2336164): n is a, c, g, or t
  misc_feature (2336679)..(2336993): n is a, c, g, or t
  misc_feature (2339664)..(2340486): n is a, c, g, or t
  misc_feature (2347375)..(2348331): n is a, c, g, or t
  misc_feature (2355560)..(2356062): n is a, c, g, or t
  misc_feature (2360254)..(2361041): n is a, c, g, or t
  misc_feature (2364431)..(2366228): n is a, c, g, or t
  misc_feature (2379211)..(2379885): n is a, c, g, or t
  misc_feature (2380592)..(2381115): n is a, c, g, or t
  misc_feature (2388152)..(2388637): n is a, c, g, or t
  misc_feature (2393315)..(2393888): n is a, c, g, or t
  misc_feature (2398326)..(2399032): n is a, c, g, or t
  misc_feature (2411913)..(2412430): n is a, c, g, or t
  misc_feature (2416220)..(2416618): n is a, c, g, or t
  misc_feature (2419487)..(2420436): n is a, c, g, or t
  misc_feature (2425229)..(2425240): n is a, c, g, or t
  misc_feature (2435865)..(2435874): n is a, c, g, or t
  misc_feature (2446097)..(2446609): n is a, c, g, or t
  misc_feature (2468425)..(2469018): n is a, c, g, or t
  misc_feature (2469970)..(2469979): n is a, c, g, or t
  misc_feature (2475805)..(2476281): n is a, c, g, or t
  misc_feature (2490536)..(2490759): n is a, c, g, or t
  misc_feature (2494165)..(2494937): n is a, c, g, or t
  misc_feature (2496347)..(2496955): n is a, c, g, or t
  misc_feature (2508131)..(2508347): n is a, c, g, or t
  misc_feature (2510834)..(2510843): n is a, c, g, or t
  misc_feature (2518846)..(2519237): n is a, c, g, or t
  misc_feature (2524522)..(2525074): n is a, c, g, or t
  misc_feature (2544115)..(2544758): n is a, c, g, or t
  misc_feature (2551729)..(2552371): n is a, c, g, or t
  misc_feature (2554938)..(2555751): n is a, c, g, or t
  misc_feature (2563269)..(2563511): n is a, c, g, or t
  misc_feature (2576782)..(2577129): n is a, c, g, or t
  misc_feature (2580032)..(2580469): n is a, c, g, or t
  misc_feature (2598566)..(2599386): n is a, c, g, or t
  misc_feature (2601993)..(2602316): n is a, c, g, or t
  misc_feature (2612592)..(2613945): n is a, c, g, or t
  misc_feature (2617277)..(2617840): n is a, c, g, or t
  misc_feature (2634290)..(2634539): n is a, c, g, or t
  misc_feature (2640950)..(2641015): n is a, c, g, or t
  misc_feature (2643462)..(2643807): n is a, c, g, or t
  misc_feature (2653580)..(2655011): n is a, c, g, or t
  misc_feature (2664306)..(2665182): n is a, c, g, or t
  misc_feature (2665718)..(2666244): n is a, c, g, or t
  misc_feature (2668695)..(2669251): n is a, c, g, or t
  misc_feature (2680675)..(2680842): n is a, c, g, or t
  misc_feature (2684186)..(2684781): n is a, c, g, or t
  misc_feature (2696402)..(2696739): n is a, c, g, or t
  misc_feature (2704098)..(2704320): n is a, c, g, or t
  misc_feature (2706517)..(2706875): n is a, c, g, or t
  misc_feature (2710251)..(2710576): n is a, c, g, or t
  misc_feature (2712326)..(2712335): n is a, c, g, or t
  misc_feature (2713094)..(2713215): n is a, c, g, or t
  misc_feature (2741299)..(2741496): n is a, c, g, or t
  misc_feature (2744837)..(2745641): n is a, c, g, or t
  misc_feature (2756171)..(2756751): n is a, c, g, or t
  misc_feature (2756889)..(2757517): n is a, c, g, or t
  misc_feature (2782403)..(2782568): n is a, c, g, or t
  misc_feature (2792221)..(2792382): n is a, c, g, or t
  misc_feature (2796608)..(2798266): n is a, c, g, or t
  misc_feature (2804317)..(2805181): n is a, c, g, or t
  misc_feature (2812497)..(2813548): n is a, c, g, or t
  misc_feature (2816250)..(2816294): n is a, c, g, or t
  misc_feature (2843364)..(2844769): n is a, c, g, or t
  misc_feature (2845719)..(2846347): n is a, c, g, or t
  misc_feature (2868809)..(2869501): n is a, c, g, or t
  misc_feature (2874410)..(2874655): n is a, c, g, or t
  misc_feature (2875373)..(2875421): n is a, c, g, or t
  misc_feature (2877536)..(2878017): n is a, c, g, or t
  misc_feature (2898613)..(2899327): n is a, c, g, or t
  misc_feature (2901303)..(2901873): n is a, c, g, or t
  misc_feature (2910413)..(2910998): n is a, c, g, or t
  misc_feature (2913423)..(2916158): n is a, c, g, or t
  misc_feature (2921199)..(2921934): n is a, c, g, or t
  misc_feature (2923537)..(2927958): n is a, c, g, or t
  misc_feature (2928306)..(2928725): n is a, c, g, or t
  misc_feature (2937378)..(2938098): n is a, c, g, or t
  misc_feature (2956640)..(2956770): n is a, c, g, or t
  misc_feature (2958244)..(2958513): n is a, c, g, or t
  misc_feature (2961010)..(2962355): n is a, c, g, or t
  misc_feature (2974263)..(2974272): n is a, c, g, or t
  misc_feature (2974846)..(2974855): n is a, c, g, or t
  misc_feature (2983474)..(2983984): n is a, c, g, or t
  misc_feature (2984775)..(2985933): n is a, c, g, or t
  misc_feature (2989736)..(2989969): n is a, c, g, or t
  misc_feature (2994539)..(2994626): n is a, c, g, or t
  misc_feature (2999010)..(2999019): n is a, c, g, or t
  misc_feature (3006041)..(3006536): n is a, c, g, or t
  misc_feature (3019416)..(3019791): n is a, c, g, or t
  misc_feature (3024020)..(3026007): n is a, c, g, or t
  misc_feature (3028831)..(3031062): n is a, c, g, or t
  misc_feature (3031922)..(3033332): n is a, c, g, or t
  misc_feature (3033823)..(3034028): n is a, c, g, or t
  misc_feature (3035765)..(3036765): n is a, c, g, or t
  misc_feature (3041566)..(3041922): n is a, c, g, or t
  misc_feature (3047445)..(3047517): n is a, c, g, or t
  misc_feature (3048238)..(3048916): n is a, c, g, or t
  misc_feature (3063843)..(3065144): n is a, c, g, or t
  misc_feature (3070717)..(3071144): n is a, c, g, or t
  misc_feature (3072653)..(3072662): n is a, c, g, or t
  misc_feature (3113133)..(3113239): n is a, c, g, or t
  misc_feature (3130455)..(3131536): n is a, c, g, or t
  misc_feature (3185977)..(3186406): n is a, c, g, or t
  misc_feature (3188364)..(3190095): n is a, c, g, or t
  misc_feature (3192980)..(3193724): n is a, c, g, or t
  misc_feature (3210713)..(3211565): n is a, c, g, or t
  misc_feature (3229591)..(3230487): n is a, c, g, or t
  misc_feature (3381223)..(3383659): n is a, c, g, or t
  misc_feature (3406220)..(3406897): n is a, c, g, or t
  misc_feature (3410160)..(3410169): n is a, c, g, or t
  misc_feature (3421256)..(3421265): n is a, c, g, or t
  misc_feature (3422437)..(3423908): n is a, c, g, or t
  misc_feature (3477431)..(3477478): n is a, c, g, or t
  misc_feature (3510511)..(3510713): n is a, c, g, or t
  misc_feature (3511004)..(3511164): n is a, c, g, or t
  misc_feature (3534517)..(3536057): n is a, c, g, or t
  misc_feature (3562147)..(3562197): n is a, c, g, or t
  misc_feature (3585108)..(3586248): n is a, c, g, or t
  misc_feature (3630839)..(3632104): n is a, c, g, or t
  misc_feature (3657066)..(3657744): n is a, c, g, or t
  misc_feature (3660075)..(3660890): n is a, c, g, or t
  misc_feature (3664708)..(3665308): n is a, c, g, or t
  misc_feature (3666216)..(3667376): n is a, c, g, or t
  misc_feature (3710638)..(3711758): n is a, c, g, or t
  misc_feature (3746990)..(3747572): n is a, c, g, or t
aagatgaaacaaacaggaaaattaacagcacacccctgtgaaatcaccaattttggagactagatttgtgattgtgagaaaaccatcgatgcacaaaaacaaaattgaaggtcctcagttaaaaaaaaacatcatgaatcaccacaaaattttccagcactggagagactcaacaacctttgccagacagaagtaatttattcagcaacaaaacaaattggttggggaaaagagggaattcaggaacttaggatccacccaccaaaaggaaaacaactcacttcaaatctcagggaccccgcaagacaaatggaaattccggtcagttgtttattttttgtgccctcaattgaaaacaaaaaattccagaaattcactttgaaaaaagaatgaaaagacagaataaagagaaaggaaactttacaataattctggaaggatgaacagaaaagcagttgaggtaaccaatatatggcccaaaggggtgctgataatgaaataacaaagcaaaggcagatcaagtcttcaaatttcaagtaccacacaagctgcacaaggcagcatgttatatatacaacaccttgagactcatatgagaagaggatagacatgaagatgaaaaaaaaaaaatcaaaaacaaaaaacgtgaaaagtgaagagagagaaagagaaggagagagagagagagagaagaaatacttcaatgcaatctaccgagataagaataaactgaaattctgcagtggaaccaagcaaggttggcttgataattgagcagcttgatgaacagtgtcttggcttttgattatggccaaagggcaagagatttttgagacaattaccaaccaatgctatgcaatcagacagaactcatgagagagtttcttattttctcattttctgctttttatgctgggaacaacaacttgaaacatctactcatcaatacttatctgttttcatggaatgtatgtctaatagtataataataataataaaatatgtgtggaaaagagagagagagagagagagagagagaatatttctggggttgatgggtctgaaccataaaatgacccatgcatttgttgtggtcacaaatcacagtgccacttgttttggcacatttcaatttgcagaaacaataatgatggattgaacagccacgtttgttttggtataatgtttcaatgtcatcactaaatctgatattttagtactattaccctagttttagtttgtttgttaagggcacggtaagagtggtaagggcactgatgttaaggaattaaaaaataattatattaaaatgagtaatattatatttttaggatttttttattttcttatatttttatattcaatattcttttaatgtcttaattagtgtttaaaagtaatttttagtaagactctttttttaacgtctttggttacatttatgaggaatttaatgattttattagagagagataataactgttgaaaatttaatgattttattagagagagataataactgttgaaaataagaatatgacagagttggcannnnnnnnnnnnnnnnnnnnnnnnnnnnnnnnnnnnnnnnnnnnnnnnnnnnnnnnnnnnnnnnnnnnnnnnnnnnnnnnnnnnnnnnnnnnnnnnnnnnnnnnnnnnnnnnnnnnnnnnnnnnnnnnnnnnnnnnnnnnnnnnnnnnnnnnnnnnnnnnnnnnnnnnnnnnnnnnnnnnnnnnnnnnnnnnnnnnnnnnnnnnnnnnnnnnnnnnnnnnnnnnnnnnnnnnnnnnnnnnnnnnnnnnnnnnnnnnnnnnnnnnnnnnnnnnnnnnnnnnnnnnnnnnnnnnnnnnnnnnnnnnnnnnnnnnnnnnnnnnnnnnnnnnnnnnnnnnnnnnnnnnnnnnnnnnnnnnnnnnnnnnnnnnnnnnnnnnnnnnnnnnnnnnnnnnnnnnnnnnnnnnnnnnnnnnnnnnnnnnnnnnnnnnnnnnnnnnnnnnnnnnnnnnnnnnnnnnnnnnnnnnnnnnnnnnnnnnnnnnnnnnnnnnnnnnnnnnnnnnnnnnnnnnnnnnnnnnnnnnnnnnnnnnnnnnnnnnnnnnnnnnnnnnnnnnnnnnnnnnnnnnnnnnnnnnnnnnnnnnnnnnnnnnnnnnnnnnnnnnnnnnnnnnnnnnnnnnnnnnnnnnnnnnnnnnnnnnnnnnnnnnnnnnnnnnnnnnnnnnnnnnnnnnnnnnnnnnnnnnnnnnnnnnnnnnnnnnnnnnnnnnnnnnnnnnnnnnnnnnnnnnnnnnnnnnnnnnnnnnnnnnnnnnnnnnnnnnnnnnnnnnnnnnnnnnnnnnnnnnnnnnnnnnnnnnnnnnnnnnnnnnnnnnnnnnnnnnnnnnnnnnnnnnnnnnnnnnnnnnnnnnnnnnnnnnnnnnnnnnnnnnnnnnnnnnnnnnnnnnnnnnnnnnnnnnnnnnnnnnnnnnnnnnnnnnnnnnnnnnnnnnnnnnnnnnnnnnnnnnnnnnnnnnnnnnnnnnnnnnnnnnnnnnnnnnnnnnnnnnnnnnnnnnnnnnnnnnnnnnnnnnnnnnnnnnnnnnnnnnnnnnnnnnnnnnnnnnnnnnnnnnnnnnnnnnnnnnnnnnnnnnnnnnnnnnnnnnnnnnnnnnnnnnnnnnnnnnnnnnnnnnnnnnnnnnnnnnnnnnnnnnnnnnnnnnnnnnnnnnnnnnnnnnnnnnnnnnnnnnnnnnnnnnnnnnnnnnnnnnnnnnnnnnnnnnnnnnnnnnnnnnnnnnnnnnnnnnnnnnnnnnnnnnnnnnnnnnnnnnnnnnnnnnnnnnnnnnnnnnnnnnnnnnnnnnnnnnnnnnnnnnnnnnnnnnnnnnnnnnnnnnnnnnnnnnnnnnnnnnnnnnnnnnnnnnnnnnnnnnnnnnnnnnnnnnnnnnnnnnnnnnnnnnnnnnnnnnnnnnnnnnnnnnnnnnnnnnnnnnnnnnnnnnnnnnnnnnnnnnnnnnnnnnnnnnnnnnnnnnnnnnnnnnnnnnnnnnnnnnnnnnnnnnnnnnnnnnnnnnnnnnnnnnnnnnnnnnnnnnnnnnnnnnnnnnnnnnnnnnnnnnnnnnnnnnnnnnnnnnnnnnnnnnnnnnnnnnnnnnnnnnnnnnnnnnnnnnnnnnnnnnnnnnnnnnnnnnnnnnnnnnnnnnnnnnnnnnnnnnnnnnnnnnnnnnnnnnnnnnnnnnnnnnnnnnnnnnnnnnnnnnnnnnnnnnnnnnnnnnnnnnnnnnnnnnnnnnnnnnnnnnnnnnnnnnnnnnnnnnnnnnnnnnnnnnnnnnnnnnnnnnnnnnnnnnnnnnnnnnnnnnnnnnnnnnnnnnnnnnnnnnnnnnnnnnnnnnnnnnnnnnnnnnnnnnnnnnnnnnnnnnnnnnnnnnnnnnnnnnnnnnnnnnnnnnnnnnnnnnnnnnnnnnnnnnnnnnnnnnnnnnnnnnnnnnnnnnnnnnnnngttttacttttcatttttttttttgtttcaaaacagttttcatttacttatcaatcagtttctcatttaaaaatctactgagttttaaaaactattatgaaaaagtgttttaaaaactataaaacagaaacaagttaaagaaattttccttttcagttctcaataataacaaatgggttaagatatcagctggttaaaatagcaagcacactatgttctcaaggagaaaaaaataagataaaagtatatagaaagaaagaaaaatgtcattggcaggaaggttggttcacgggaaggcataggtaagctggaggccacaattgaaaatcaatagctgttttcattataccttaactaaaaaacttaattcaccaaccaaacaacttttttctattttctagtttttgaaaactaatgacagtttttaaaaatgatattcaaacacaccataaatttcttcttttttcttatttgattgcataaaaaatagaaggaaagaaaatatatactatatactctggaataaatatatattcttaataaaaaaagtgtgtaaatataatagtttggtattataatcatacaaaaatgatttttttcctcctttctcttcaaaaatggaaagatcaaaacagtgatgggccacatttatatactttcttaaatagagatataaaatgggtcaaatgattaagaaaaaaggaaaaaaaaaaagaaaaaaaaattcatattcaatctcttcaagtaacaaaaactaatcattaatatttgttgataaaaaaatatttatatactttcttacgttttttttttcttttgacatttgtcccaaacaaatgaataaatgttttatgctaattaaccataagtaagtgtgttaaactatgattcccttaaccaagtcatagccatgcatggttctctcttaatttcttgctcagccatttttccctgcttcccttcccccacaactcattcaatagcttgtcccattcgtgtggtaaaggtttgttggaaaaccaaaattagatcgaagttcatccaaaaaccaaaattctattgcgcctgtcactgcatgcgtttaacactttaactttaatgggggtggggtcatttcgtggtaacttgagtcagttttaatttgtttctttctttccatgggttgacacaccaataagtagaagaagggaaattggaatcttcctcctttgaagaacaaggaattagctctttattctgccatagttcttcgtttggcaacttaaagtatatctaaaatttctcttacttctaagatcatcttgatttttcattttattttacagacagtttaaattaggggaagacttattcctttgtaaagtcactaaatatcattaacctcaacaataatttaatatcatgtgaataaaaagaaaatataagaatataacccaaatcataactagtgtaagcagaaattaaactcaaccagacatgttatactggatatatagatgttcagttactctagtccaacacctgtccggctctctataaggctaaaatgaccttaattagaggcagcaagaggttagaccctttaataatgcttagaggtaaactaaatggtaatttgttctttaaggcccaagaaggttttatttaattacggtattggtacaaactacagagtatttattatttttatgggtgaataatttttgttagcaaatttgactagtcatttttagtgagatttttttttaaattagattttttttatctaaaaactcaaattcaagacttaatttaagaaaagatcaaatctaatatcactcaaattaataacttattgataaaactaaaaaaggtttgtatatttataaagttaagatcctacatatgaagatcactacacaattcgcatttactatccggtatataccgaacactggaataagagacgaataaaaacaaggagtacgactaagggctaaggaccatagtgccccccagccactgtttggcagcaacatatatgtctgttaaaaaaaaaaatagaagataaattacaaataaattaaccaaaacaagcacatgaaaagaatagcaagtatgcaagatctgccatcaatataaataaaatatagacaattaagttcaagatctaacatatatcttaaaattagaaaaaagttacataaaaaaaaaaaaaannnnnnnnnnnnnnnnnnnnnnnnnnnnnnnnnnnnnnnnnnnnnnnnnnnnnnnnnnnnnnnnnnnnnnnnnnnnnnnnnnnnnnnnnnnnnnnnnnnnnnnnnnnnnnnnnnnnnnnnnnnnnnnnnnnnnnnnnnnnnnnnnnnnnnnnnnnnnnnnnnnnnnnnnnnnnnnnnnnnnnnnnnnnnnnnnnnnnnnnnnnnnnnnnnnnnnnnnnnnnnnnnnnnnnnnnnnnnnnnnnnnnnnnnnnnnnnnnnnnnnnnnnnnnnnnnnnnnnnnnnnnnnnnnnnnnnnnnnnnnnnnnnnnnnnnnnnnnnnnnnnnnnnnnnnnnnnnnnnnnnnnnnnnnnnnnnnnnnnnnnnnnnnnnnnnnnnnnnnnnnnnnnnnnnnnnnnnnnnnnnnnnnnnnnnnnnnnnnnnnnnnnnnnnnnnnnnnnnnnnnnnnnnnnnnnnnnnnnnnnnnnnnnnnnnnnnnnnnnnnnnnnnnnnnnnnnnnnnnnnnnnnnnnnnnnnnnnnnnnnnnnnnnnnnnnnnnnnnnnnnnnnnnnnnnnnnnnnnnnnnnnnnnnnnnnnnnnnnnnnnnnnnnnnnnnnnnnnnnnnnnnnnnnnnnnnnnnnnnnnnnnnnnnnnnnnnnnnnnnnnnnnnnnnnnnnnnnnnnnnnnnnnnnnnnnnnnnnnnnnnnnnnnnnnnnnnnnnnnnnnnnnnnnnnnnnnnnnnnnnnnnnnnnnnnnnnnnnnnnnnnnnnnnnnnnnnnnnnnnnnnnnnnnnnnnnnnnnnnnnnnnnnnnnnnnnnnnnnnnnnnnnnnnnnnnnnnnnnnnnnnnnnnnnnnnnnnnnnnnnnnnnnnnnnnnnnnnnnnnnnnnnnnnnnnnnnnnnnnnnnnnnnnnnnnnnnnnnnnnnnnnnnnnnnnnnnnnnnnnnnnnnnnnnnnnnnnnnnnnnnnnnnnnnnnnnnnnnnnnnnnnnnnnnnnnnnnnnnnnnnnnnnnnnnnnnnnnnnnnnnnnnnnnnnnnnnnnnnnnnnnnnnnnnnnnnnnnnnnnnnnnnnnnnnnnnnnnnnnnnnnnnnnnnnnnnnnnnnnnnnnnnnnnnnnnnnnnnnnnnnnnnnnnnnnnnnnnnnnnnnnnnnnnnnnnnnnnnnnnnnnnnnnnnnnnnnnnnnnnnnnnnnnnnnnnnnnnnnnnnnnnnnnnnnnnnnnnnnnnnnnnnnnnnnnnnnnnnnnnnnnnnnnnnnnnnnnnnnnnnnnnnnnnnnnnnnnnnnnnnnnnnnnnnnnnnnnnnnnnnnnnnnnnnnnnnnnnnnnnnnnnnnnnnnnnnnnnnnnnnnnnnnnnnnnnnnnnnnnnnnnnnnnnnnnnnnnnnnnnnnnnnnnnnnnnnnnnnnnnnnnnnnnnnnnnnnnnnnnnnnnnnnnnnnnnnnnnnnnnnnnnnnnnnnnnnnnnnnnnnnnnnnnnnnnnnnnnnnnnnnnnnnnnnnnnnnnnnnnnnnnnnnnnnnnnnnnnnnnnnnnnnnnnnnnnnnnnnnnnnnnnnattaaaagttaatcctttgtatctacaaaaatgttattatatcaaataaaaatataaatacatgattaaagtgggttcaaatattacaacccctaatcaatcaattaatagtttagatttgacttttctaaaattatgaaagttaaaatatgtaatttcagtcgttgataagaaaattaatagtgaatattataatatatttatgatttattatatatacacattaaatcaataattattttttattcaacaaataaaattacttctttcaatttagaaaagccgaatcctaatggtttagagccatcagcaatacaatttggcagccaggctccaatagaagttagaacttggaaccagtaaaagaaaagtttgtttacgtctctagaaattcaaaattttctattcgtgtgggagaataattgttttctttttaaaggcaaatttattaaaagatttaacccacaaggtgtgttccaaaaccttatcagaggatacactgttggtaatcgacaatcacacacaaatcaaaaaacagaaaagaaaatagggaagagagatatgacacagtactttatcctgattcacccaatgtaggctacgtccagcttgtctatactataatcaccttaccgccactcgttacaagtcacacggtttacaagtggaatataaataggattaaaaagaaaccctaacagcagctattcatggaccctagcccaaactactaataaaagtaaaatattacaaataatcagaggcccataacagtacctagtctctgcgggcctgggggcgctgccccccggacccccgtccgctcacctgggagcgggaccccagttggctttctgctgaccccgccaacaagaagggttgtcatctgactgcgaaagatgagccatatccaacatacacatcatgtttacatatagtaacctcaaaaaatcctcacaaaaacttctcaaaatgagaagcatggaaaataaaagctcaagaacaactaataaacaaaacaacacgatatgcttattcgagaggaatgattaagctaatataactctcagtctattttgtctaaaaagaaatctcagtcaattaattcatatgctcaataataaggcataaattaaattatatcatcacagataaaattttgatcttaaggtaaatgagtttttgaaagtaaagggcaatatcaacttttttgatacgtattattagattcgatttgaaatattaattctgaatttaaattatacttcagttcttgaaagttctattctcaaatcaaatactttaaagtttctctcttctccaattgcttaggaactaggaaggttctatggctgttagcgtggctaattagcacacttattattaaaatgaaatgcatctttcaagtgattattatcattatttttctttcctcgttaagtcacgtgttatttttttaataaataatgatatgtcttcttacaaatttcttattattttataaaaattattaaataaaagtaaatatttttaaatgtaaaatacagtcaatatttgttataaatataaaaattaaaaaccgagctaaaagaatttaaaattacttttttaaatttattgtagcttgttgaaaaattggtgattgaaacctaacttgcacttctcacaccgttccccactaacactcattaacttattgacctcttcagtgactgagatttgtatatatattttttgttaatgactgagacttgtatggacgaacgacactgctatattgctagcactaatatattaaataggagtctcctgcattattgttgttttgcaaattcataatattattgatattggggaaatgaggacatatttacaatctaatgaattggtatctttttataaagccgtgacactatttttttttattaattttaaataatgggcattagagaattctttaagaacacgtaacattattggtttgtcttaatcaaaatacatccactaatttttcattaattgaatgagttcatctatatagtaacagttattttttttggacagattagtaacagttattaatatttttttataaagttattactatattgtgcattataagattaccttttttaaatattattacgattaggaagtttttcaaaaattgctttttccgcccttaataatttttcatttacaattgctagttgttttggattacggttaaggttcaatttacataatgatctactttggtctacgttggattaattcaaattgtaagagtcgaagttaacatcaagtataggccttctaatatacattcgcgaatcataaattacacattagtttgaagcaaagttataatttgctatgccaagaaagagtattattgctcacatgaggccttgggttttgtgccgtagaatatagacaatctcaaattcttataaataaaccaacgtcattatgactcataagtatttattattttattacatagagttactctggtataatattcaataacttaattaagttttaaagtatttttacaagtaattattcacttacacaatgtcttaattaactatattttagagcttaattaccaccaactaaagctcttgaacttcagtctacgtagaagtcaacctcagtcaacactcaccaaagttcagagtcatagttagtcgtccatcttgaacacgttagtacaatccatcttagagtataattggtgacttggtgtcgtctgtgaattttttttatatatatcataattaacagaagcaagatgataaaacaactcaatttgagctcacttcagatggacatactaaagatgtaagttttcaggttccacttgtttatacaacaactacaaaaatagattgtcaaatattgaagcaacatccaaaaccagtttaaccacctattaacgagtttcaactataactaagtcctatatcatcaaaatcaactatgtagtgcatctacatacatttgatttatagctgaaattgttggtgcatgttttaacaaaattcaatggataaaaataaatataaataaaacaatttttttaaaaatatttttgtctcaaaaaacacttttcatcgaattttcaaacatgctcataattgaataaatagcatgtaaaatgaatgtttacatgctatttatagagtttgttagtagtaataataacaatcagcacaaattaactaactaaccaatttcaacgaaaataaatattttttcctaattataaaatccctttaattaattcatgtcttttaaaaaaataataattattttcttatctttctattcacttaattatttatcattaattctggagagaaaaataattaagaatatgtaaagaataattaatatatctaaaaattgaaaaaaaaatctataaataaataaataattttttaaaaagattttataataaaaaaaatccactaaccgtacgaaaaaaaaaacattatacagtaaatctcgtgaggctagttcgctatactgcaacaacgaagtacaaatcctaataaatgcaataatatcgaacaatcatctaatgactgcatctaacagccaatctattttacacgatgtccactaaaattggctctcacacgacagctgcactaattgttgggtcccagacacgtgagtgaaaataatggccatgttcctatcaactccttaccaaaaattcagaaaaagagcaaagcctaaacagtgtaccagggtttacaaaattgttcagattgcttattatagaacaacttcatgtcttacaaaaaatatcaaaaccggcctcttagatttagggtttaattaaatagtgtcttacgtacatataagatataacacatcgttattatcatgtaaagataatatatgaacaaagtaattttagcataaatttcactgtttccggaattttagattatgtttcaaaagaatatgtaagatccatgcattgatagagactatcctcttctagatatatcatgcatatatgcagacctacacaaatagatcagatctaacaaactcttcgtacacctagagccagcataatgttgttgcagtttgggtgtaaataattaaagtggaagaaaagaagaagaagaaaaaaaaaactaaatttaagggaagagatacaaaggaggaaagttattttgatatacgaacatttatgctaacaaaaattggaggacaagttaaaattcattttaaatttgtgagaatttttcaattagaatatttatttgtctcccattgatggtttatgtggttacgttggggacgtggtttgaagatgtcttttatatataaaaatgagaacttaattgtagaaaagttatatgtgcaatttattttaaagaaattgaaatagatgtacggtttttcattggaccactgaactgcttctcgatctggagttgttttccgtgcaactttgggaccgttcgtttggcttgtctaattaatcaaagatgtgcatgaataacattaaaaaacaatatacgtacattttcgtcaaccatgatctgtttcggcatatagggaatttcattttgaattgtgcttggcttttatattactaagagaggttaattggtaagcaatttgatatacttgttctcacatgcaagaaattaagaaccgaagaatattccatattcccctcggggggaaaaaacaaaaggaactgggcttgtggtataagggtagaattctgttttcaaatttgttctggtatgcacctcaagagattatttggtgtgacatggttaggagtttatttctggttttgtgcatatgaacaaatatatattaaaagatgttacttttttaaatgaattttagtattttgaagaatttttcattgattctcagtagagaaatacaatggccaacaaaaaaaaaataatgatgtgttacttttttattagtttaaataatgttgtgtcacatcatttttagcaaataaaaaaaataaattaattcctttgaaaatgaaaatgtggagtagagaaatgatgtcatagatatttaaagacaaaataatagtaaagttagttttataaatttgttatacattttttatttttaaaaatttatgtaaaataaaaataggacaacacttaatattggacgagttacataattaatattatttattgatgtggtcgaggtggtgcaagatgcatcaattattcttcattgaattttacgggaaagttcccatattaatatgcattcaatttcccgtatgtgaggaaattaatatttttttagtagtatgaattgaagacgttatgagaaaatttataataactcatatattttatttaaccaaatgagccgagctaaactatgggataaaggaaaatgttaaacgtgccttaaaatttttatagcacaagttttattgatttcacaatatttgtgaacatttgagtttctgctgctccccaaacgagtgcccatacaaaaagtgtggacaacatgatgctattgggtttggatgtatgtatgatggttgcggaatgtttctttcacaccctttttcagttttctacacttcttttacattccattactcttttgcattttaattcatttacacgctgaagcagagtgtgaattccaaaaagtgagagattttatgctctattttggatgtaatcattttcgaaaatctatgctctataataggttgtggacatatgagtggaatgtgggccttgccgtgtagtgttgtgttctgggccttttgttctttgaagtgctctgagtctgactgtcaacttattagatatcatcctaaatatgatttttaaaataattattatataagtcaataaaattatcatgagatatgattagataatatgtagtatttttttatattttcaatatattttaattcaattcaatttttattgagaattaggataaagttacgataaaaatcagagtgtgtattgggaagtaataacatgttttcactaaaaattatatattttcaattcttttagtattatcctgaaagtacttgttagcattcttagtaataagctaaaatgtgaacttcaaaatcagcgagccaatctcattgataatgagattaatttactttatcaattcactggaattggtatttttttaggtacatacatattctcaggagacggatctagaaaaataattaaaggagatactagtggccgtcatacacttagtagtagggattcgggggcaacactcccttatttttttataaaaaaatttaaaagaataaataattataaatcataatctaaaagaacaaataatgaattttttaacattcacataagatataagagaacatagaaatatatatatatattatatatataaagttataaatataaatttgaagaatatatctagtatcagatattaagaatgctaattttacaagtaaaataaaatcttatttttattgatgtataaattgaatgacgacttacaaaaacaatactatctacgtcattataatctttgtttactgaacgaacatgttatcctcgtagatcaattttatttcatttggtaatgtaaaacctgtcccatttcagtgtcaaattatgccataagattacacacctttttgacaattggatcattggttgatgaagtcgaaaaatgttaaacgtaaatagagatagagaaaataatagatattttaagttatatgataaacaaatagaaattagataaaaaaattcaaattcatatatttataataatccaatgaagccaccctcgacgtcactttagctattttatnnnnnnnnnnnnnnnnnnnnnnnnnnnnnnnnnnnnnnnnnnnnnnnnnnnnnnnnnnnnnnnnnnnnnnnnnnnnnnnnnnnnnnnnnnnnnnnnnnnnnnnnnnnnnnnnnnnnnnnnnnnnnnnnnnnnnnnnnnnnnnnnnnnnnnnnnnnnnnnnnnnnnnnnnnnnnnnnnnnnnnnnnnnnnnnnnnnnnnnnnnnnnnnnnnnnnnnnnnnnnnnnnnnnnnnnnnnnnnnnnnnnnnnnnnnnnnnnnnnnnnnnnnnnnnnnnnnnnnnnnnnnnnnnnnnnnnnnnnnnnnnnnnnnnnnnnnnnnnnnnnnnnnnnnnnnnnnnnnnnnnnnnnnnnnnnnnnnnnnnnnnnnnnnnnnnnnnnnnnnnnnnnnnnnnnnnnnnnnnnnnnnnnnnnnnnnnnnnnnnnnnnnnnnnnnnnnnnnnnnnnnnnnnnnnnnnnnnnnnnnnnnnnnnnnnnnnnnnnnnnnnnnnnnnntaaattttggacatgtaattacattaaataattaaagaaagaatagttaaagtcagcacaagtaaaatgtacgtaacattctcttaatttgtctcaaaataatttaaattttggacatgtaatcacattattaaaaaaatttggacaccgaatacactattttcttgtatacataaatgcttagtcatttcacgttcattttccatttgtagatgggaagggactagttcaattcaacattgcaaataagaatgcccatgctacttttttgatgatgaattcttaaacgagagactaacaatgggttgagagtactagagcttcttctaagacggtttagagatgaagtcaaagtatgacacgttcttcattaattattcatcctcttgaaaattaagcactgtttataccaaattcaaattttttcaccctctatacatggtgtctaccatccacataacaatgtaacatgctttctttttcatggcttgatgctgtctccggaaacacttttcttgttttaaaccttttctacaaggtgttgttaactaatgtctttataacattgagtaaagaattaaaaaattatattgtgaaaattataaaaaatatataaaaaaagttataaatattttttttccttaactaataccttaagaatattgattgaaatttttctttctacaaaaactaatggatttaattaagggttttattaaccaatacctttagagtattagttaaagaagttaaaaaagaaaatatgtattatataaatcataaaaaatctatgaataacataatttgtcatcttttaataaaatattttcttttaaatatcttaaccaatatttttaggatactggttagtgtttttgtttaattaattactttcaaacatagctatcgtcacattccttgcttgactctatgcggacactattcccacaagagaatatgctgtccccaaacaaagaaccaaatatttgtgagacattctccatggttcacaaggcagcgtgggaaaaacttggcattttcgtaggaaaggtactaatgctagttggagagggttcataaagcatggtgaattaataaattgtgtaatcaagtttttttttagtgatatccacctaaaatttacttcttctacactcatatataagaaaaagataataaaatttacacaaattaagaaagttggttgacattatttaattttattaatcttaaataaaaaataattatttctaaaatgtttttcattgaaatttattatcatgaataaaaataaatcattgaaaataaaattagaattaaataaaaagtattttaagaatgataatattaaataggataaaattagttagatttatttatattgatgttaaacagataaattttttttcttctcatgtatgagaccaaagagaataatatttaatacatatagttacgtcaaagaatatggtttaggtacttttttttccattatttatcttaaaagttaaaagagagacatgtgcaatttcaaagaggttagatgaaacttcttacaatttgattatacgtacgaattctttcttaatggaatcaacaactgatagaaagttctcgtcacccaaatgttactttgaatatgcatgcaatcttgaatttttccaaacttcatgttcattccttgttgttggactaaaaaggtttaatttggatatgcaactaaagatggtttaatggcactttgaatcccgattcatttgaaaataataaaaaaaaaaaaaacgagggacatatgtctaannnnnnnnnnnnnnnnnnnnnnnnnnnnnnnnnnnnnnnnnnnnnnnnnnnnnnnnnnnnnnnnnnnnnnnnnnnnnnnnnnnnnnnnnnnnnnnnnnnnnnnnnnnnnnnnnnnnnnnnnnnnnnnnnnnnnnnnnnnnnnnnnnnnnnnnnnnnnnnnnnnnnnnnnnnnnnnnnnnnnnnnnnnnnnnnnnnnnnnnnnnnnnnnnnnnnnnnnnnnnnnnnnnnnnnnnnnnnnnnnnnnnnnnnnnnnnnnnnnnnnnnnnnnnnnnnnnnnnnnnnnnnnnnnnnnnnnnnnnnnnnnnnnnnnnnnnnnnnnnnnnnnnnnnnnnnnnnnnnnnnnnnnnnnnnnnnnnnnnnnnnnnnnnnnnnnnnnnnnnnnnnnnnnnnnnnnnnnnnnnnnnnnnnnnnnnnnnnnnnnnnnnnnnnnnnnnnnnnnnnnnnnnnnnnnnnnnnnnnnnnnnnnnnnnnnnnnnnnnnnnnnnnnnnnnnnnnnnnnnnnnnnnnnnnnnnnnnnnnnnnnnnnnnnnnnnnnnnnnnnnnnnnnnnnnnnnnnnnnnnnnnnnnnnnnnnnnnnnnnnnnnnnnnnnnnnnnnnnnnnnnnnnnnnnnnnnnnnnnnnnnnnnnnnnnnnnnnnnnnnnnnnnnnnnnnnnnnnnnnnnnnnnnnnnnnnnnnnnnnnnnnnnnnnnnnnnnnnnnnnnnnnnnnnnnnnnnnnnnnnnnnnnnnnnnnnnnnnnnnnnnnnnnnnnnnnnnnnnnnnnnnnnnnnnnnnnnnnnnnnnaatcatcattttctttttattttgatgatttgtattatgttgtgaaacttgttataataaatatgccttcaagacaaatttaagatacagtgtcgttgatatgacaacaaattaaacctttgaaattttcaatactaataataacaataatagtgccttggcgtgtcaggttgttgggaagttggctattaaatataaagcctaacaatatattttgtgatgttctttttaattattattatttttatgtggaaactagtaaaaatttattagagactaaccataaaaaaaggaattatacttacacaatttcgtcattgcaaaaatgtgtgtctatattggagtatgttgttagaaaaaattataccattgctgtcaaatgaaatattaccatttacaagttgacattctttttccaactttcaacgtcacgttggcaattcacgcattaaggaagttgtcgtgtgcatgaacataagagtcaaaatcttaccaatacttaataaaagcaggtaggattttagattttagagcctggtttggggcgcttggcccttacttcaatctttgaagagtcaacgtgaacaaaacagttatgtttacattggttcaatgaataacaattgactacgctatttcctcagttaccccttgcttcacttctttatccaaaggccatacacttggcattttcttcttacttcttcccagacaaacaaatacttacaattttggagaaatttttcatttcattcacacccttttcaccattggtgctgttttggcctgagaaagaaaaataaaaaactttcatcatgggaaactcctgcagaaaaccagtggctcatgtgtcttcagcaagtttctttggtcagttttaatttggttactttaaccatatctatatgactatataactttttctaatttatcttttttagtacaaagtataaagccttcaattgtttttcttcaacttttctgttatcatcagttagcacttgtcatgccacttaggttgatgatgatgatgccttaaatatgattacggtttgttatattggatgattttatttttctctctttggtatccacggagagaagaagaaggcgatgttctcaaaatggtaaaggttaaaacaatagttcataggttgtaacgtgaaagattataggactagctagtcttgaattgagcttcttttgttttcttgtttgtttattgttctcaagtccttggcttcctaggattgaattgaatttttgtcttttgagtaatttatatataaaccttctgtattgtgttaatattggcctgaaaaaaatggagattatgaggcttcgtcgctctgaatcaggttctaaataatgttgaataatttttgcttttttctgttaatgcagttgctagtgtgtggattgaaattagctgcattttcctttggctattttttctttcttttcaacaataaggcactggtgctccgaatgagctaattgtatgttactggatgtttgtataacatctccctccccctttgcttgtttaaaacaattcttgtctatcgagaataatgtaaaaggggttagttcaatgatgaaatgcgttcagcaaaaaaaatttcaatttattatgttttaagtttggaattctaatagcctttggttgtttttcattattgttcctatattttgtgcatgcagtgtagcaaaaatcaattattcactcttaacacttaatgtccatatatgcttgctcaatcaatcactctttttgcacctcgtagctagtaatcaacttctagatgccacacgtaatagtgcaatcttctgcactaggttttagaagttactccaatggctgattgtaacttgcatatcatctactctcaggaagcacaaagtgtcagagtaagagaaaacagaactcaaattcttctgaacgaaaagctcctttaaaaacatcagcatcaaaagttgacaatcccatttccaatagccttaagtccttcaccttcaatgatctaagagaggccactaagaacttcaggaaagaaaacttaattggagaaggagggtttgggtttgtctacaagggatggatagatgaaaacacatgcgctccaacaaaaccagggactggaattgtagtggccatcaagaaacttaaaccagaaagctttcaaggccacagagaatggcttgtatgtccaagtccaacacaaactcttaaactgttttctaactgcttggtcttgctaggtgttgactaattttcttccctttttgtttgcaggcagaagtcaattatctaggccagcttcaccacgaaaatatggtgaaacttattggttactgcacagatggtaaaaacaggcttctagtttatgagtttatgcagaaaggaagtttggaaaatcatttattcagaagtaagtagtacattcactcttcaacaatcaacatatctagtctcaaatgatccactgagtacaaatgtacaaatgggtggaaataggataggccagacttggctatgttaggcctgagcccgatttggtttataattacaaagtctgtttgacttgtaagcctaaaagtccttcaaaaaaatcaattttaataataatgattttatatttttattaggtgcaatttgtagtatatgtataatgtattatgtattatttatatataatgtaataatataatataatattattatgtttataaatagaccgacttatcagacttaataggtttctttaaagcctggaacttgatattttcactaaaacagctttttataaagtctaagtctaaccttttaatatacgggacaggcttgacaatgccctgaaccataatttcttctttattcacaatacctcaaattttgttttctattactgcagaaggtgttcaacctattccttggattacacggatcaacattgcagttgctgttgcaagaggattaacatttttacatacccttgatgcaaatgttatatatcgtgatttaaaagctgctaacatcctacttgattcggtatgtcacactgaaagtttggcttgtggatttgggaagaaaaccacacctgctgttttgcatgtaaatctccattctgaaagagtagcactattatttatgcaggatttcaatgcaaagctttcggattttggcctagcaagagatggtcctactggagataacactcatgtttcaacaagagttattggtactcatggttatgctgcacctgagtatgtagctacaggtatatttgcctttccatttttctttatctttatcaaagtgttagtttcttagcttttggatgttgaggtagaagcaaaacaaaagcaaggagcaattgagacaaaggaagatgcaatgatgctgtgttatactaataatggacacttgtgacttattttaattctaaaaattcatttggacaccaatttgaatgcatcctagttcactacactaatttcttagtccttggtataagagacctagtgtgtgtttgggaatcagttgaatacttgaattcaacgccaacagactttcacatgaaagctagtacaacttagttgctttgaagtttttgcattggaatgtgcaatttctccatttgacgtggtttcaacgctaatccaaacacaaccctcggtaacttgtctgtaacttcttcttagaggtcacagctcaaaatgaagtaatcaaattggccaacattttgaatatttggataaccatttcggacctacttttgggtgttgaacatacttttggagaatgatgctctttatttgaacgtaattttaaaaggggtgaacggtgatccaaacatagctatatatgttattatatatataaaaagaaaacagaaagcaaatcggtttatttcttcaaaactctagagtactctacacataagagacaaaaactaaataatgttccatttgctgtgatgttatgcacatgatttgtaaagttgatgagcatatatttttcccatttataataagttgctttttgaataaacaaacaggtcatttgaccccaagaagtgatgtatacagctttggagttgtgttgttagaattactaacaggacagcgtgtagttgaagatgatagacctggattttcagaagaaacactggtggattgggcaaggccattcttgagtgatagcaaaagaattttgagaatcatggattcaaggatgggtggtcaatactccaagaaaggagcacgggctgcaggagcacttgtactacaatgtctaaattctgatcccaaatatagaccaactatggtaactgttctagcagaattggaagcactacattcctcaaattcattcccaaggaccccaaaatctggaactgagaatcatacaacaaagcattctagtcattcccacacgtcagctacaagtagtagtaacaaactatgagctgttctttctctatgtggactaatgcttttgcatcacaacaagtgctttgttctttcagttttgcgactaagtgaataattttcatctagggcaaagcattattttattttcgggtcattgtcggaaagcattaccatgcttaaacaacggggaattattcatgtgatatcatatgaattgtttcaaatgtgaaacggtagtgttttgttaggagttcaaaagggtatatagttagaaaaaccaaaacttgtaacttttgcaacgttgtattcatatccatgtaaaatcacataatttttccttcatattaatcatcatctctccaaaatgagttgtaagtttctctaaaatgtttaaaatttactcagacatctcattaaacaatgcttggttgacgtaaaagtaaccttagaggcttagacaaattttacttatgatatctctattttagacgaagacattatttccaacattattagttttctctaaaacaaaaccattgttagttcctttggatttttttatcctccttttttcttaatctttatgaatgaatcttcctatgtttccgttcatgtttatgaagaaagacaaaaacaagtataataaaatgtttagtaatttctgttggatccattacattttcctatggcaatgatccctcttatattccttctatcatcacttgcatagcaaccaaaagaaaaaagttaataaaaaccactgatgatcacaatacatcgctatggacataagaacgtttagaagcttgcagaaaagtctcaatatataggaagcaaaattggctctaggcttaatcgttgaatattttcggtcaccatatcataaagggaacaataagttacaaagcagaatgttttgttttactgtgttgggaaccagaatatcaatggtaaaggtaactctacacaaatataaacctcggtttagtctgttacaacttacaatgctgcaatttaagaaaatttaaagaaataaaactagctccttacaagatgagcaatagaaaaataaataacaaattagagaactagattcttcactcattcttaccaatttcctcatacctcctattcggttatcacacccatcatataaccccctctctcctctctctctccttgccacctgttattttctctccttaaaccacatccacatgttacactcctccccacttctgcctgtgtgcaatttgtttattttgtcttccataatctctcgtacccatatacccatattcattaatttcacttccctaccactaccatatccatatatacagtgcatatcatactatagtgtaaaactacataaaacaaaatattgtgcaaggcagtatcccaataacaatatcagtaagcagcttgttacacattttgaagtatgctgctaacattcatacatactgcacaggaatcaatgtatatagtgaagaaaaagaaaaaaactacaaaatcggaggttcactcttctcttgtggtgcccttgtaataaggagccccaaacattacctaaggtgcatgcatgcatcacaaaagtttccaagcacttcaagtaatgagaacgaatatctcagtagtatacaaaccatagaggtcatatctcatatcttctcagtaacttgatctataaatagtctggtccttctcaaatttagcagggtattgccaaattgtagtactaatactgatcatcataagtatatttactgctgccaaccatactgttgttgattgcggtttccacccatcatgttcgagccacgaccagccgctgagcccccatatggaccaccttgttggggataatttggagctccaacatagccgctggcaccaccgccacgaggaccaccaccaggcatactattggacccataaggcgccccccgcccttgaggaggataagatccactgccataaccaccaccaccttgacctcctcgatttgggtgattgaatcctccacctgggttcccattgggaggatatcttccaggcccaccagatggaccccggggcttcccataatgatgcgtaggtcctgcagcaacttggggttgagaaccatgaactggttggtttggtcctgatcgcatttgggcatgttgcccaggctgctgaatggggggaagacgagtgtgaggctgtgggtgcggcattttctgacgcttagccatttcttcattttgccgttgttgttgtcgctttttctttgtctgaaactcatgtgatgattcgtacttgggtaaactaagccatacaaaagagaacgaagttgaaaagtattgaccagaaaaggattagttgagtagaaacaataaagtaaaaaggaaaggaatcaatgagacagacatttaatccttttaagatcacataatttcaaagtaacattctcaaaataaataactaatgtacatggaaggtctaacctcttgggatcgcacggtaatggatctgtccagaaatactcagcatcaagtgcatcttttgcagtaattctctgtagaaataaaattgaccaacaaatattatgatgcagatcataaacaaaattaatcatcataaaaccatgcagccaagtgacaaataataattttcttggttacatttataaatttaataattatttttgttacaataaattttcagattacaccaagaacaacacaaatttataaatgacagcacaaagataattacttaacaaaattcgtctcaactagcactatgccatcaatgttcaccttacataagtttctcacaaaggaaaacagatgtacaatatttttctcttaagcttactgagatttttgtcaacatacatgatataattaataacaaaacaattgtggatacagttaaccaagtaaagttaaaacagattgaatgataaaagatataactggaaaaacaggtatttgaagcacttaaaatagaaattcaatatcatttaacaattaataaatcagacttataagtgaataagtgatacctgagctggatcaagtgtcaacatcttctccaacaattccagagcatgatgatcaaaactataagtcatggggaagaagctattagatataatttttatctagaaaatgaattacacgctaacttctttggtggataaaaaagcctatatactttctgatacttttgctttgatacttactgcctgaaaacttccctcaaacgtcttttcatcggccttgttggcataaatttattataataaggtatcttggaaaccccaggccaattgacttcatttggtgctccacacagctcatatattttatttaattgttctggctacaatagttacaaacaaaacctgtattacacttaagctgtacgaaaaattatcgtgaatatatacagtaatgccatgtatattaaaagaaagatctagagtgaatgtaatgactaaataactgaaaactatacagcaggtttgatccagcaatgtacccaaacattaacattccatcttttcttgacaattaaatataaaaattgtccccacacctaacactgtttttcattttagtttctgcatggaaaaactctacattttggttcctacatgaaaaatgtttacaaatgaaaacctgctatttaatcaagtattaaatttggaacctatactagacactgttttttgtttgttcttataccaaaaataaataaattacactttgtcttggttcctatatgaaaaaaaaaactacattttgatctttacacctgacacaccatttttcgttttggtccctactccctacataaaaaatctctaacactgtattaactttagcaaacgacagaaaccaatttgaaaaaattagagattatggaccaaaacatagaattcttacagggactaaaatgaaaaacagtgtcactcacgaggactaaaattttaatttaaccaaaaattaattaagcaaaatgcatatattcaaaatcaaaatacataaacatcattgacctcctgaaagaaatgacattttccaagttaaacaattaattagcttggcacccgaagaaagcaatcaatgtaaagccatttaaatgaaaacagaaaggttattttatgctcgtgggttgtggcaactaggctaagatatgtttacaatatgcagtaaaataaatatggcagcaagtgtcaagagatcgaatatgaagagtcagaatgtagagaatatcttcttgcagccatttacaagataaaagttaaaaccatatatagcccataatcaatatcacaacaatcattcatcaatctagctctaatttctctgaactatcatacataaaacatcacttacctcatcttttccaggaaagataggcttcccttgaagaagctcagcaaaaatgcacccaacagaccacatatccacagctggcccatactttgttgttcccagcagcaactcaggtggtctaaatatagccaaaaatcaatatatgcattggccaatttgataactcatgataaaaaaatgacaccaattacctgtaccataacgtaatgacacgattagtaagatttgcattttggtcattagaaaatgatcgtgccagtccaaaatctgcaagcttaagatttccttcattgtctattagaagatttgagcctgcaacagaacaaaatacatcaaataggtataataatagatttaacattctaatgtaaaaacataatcttttaacacacagacctttaatatcccgatgaagtacttgattaacatgacaatagtgaagccctgtcaaaagctgtctcatgtaacacttaagaagggaaacacaactcagacaacaataaaacgaacaactattaatatatgaaataacacttggtattaacagtaataccttaatttggggaactgtaaatctcatcccaggccggtcagcaagacctgttaaatcatggtccatgtattcaaagaccatatagatgccacctttatatttgttaccatctgcaatccccaaaaaaagaatgaaaagcagatgaactaagtttagtatgcaaagcccaaaagaaattgatggaatcatggaaatattctcaccactagaactataaagcatattaagtgttactgtctagaaattggctaattaaacgagaaggaattacttgcctggcttcccctgttcatctttctcaggacctgaaagaaataacccaattttatatataaaacaaatttttaaatcctaaatcttgaaaaagggtacctgtatcagtcacaatttccttcagcttgatcacattttcatggtgtagtttctttagaattttgatttctcgtatagcagttataggaaactgcaatggcaaaatttacaatacagttcagaggagcaactgtagcaacagattttaactgtaacttccgatttaggttcactgaatagcatgtacaatgaaaaaaggttgtaaaagcagaggagactaattaggaaagcatacaattggagcaaaacacaaataaaatacattatgcacccataatgtaataaatactgaaatattcaaatcaaagatataccccctctctctcattgtccattcgtattttcttcagagcaacaatttcaccagttttgatctctttagccatgtaaacctgactgcaagcataaatatattaaggtatacatcagttcacttgagaaagtatcagcaatgaagtgggaacaagtttgtttttttttttctctgactgggtaaagtcaaaacaagagcttaaggaacataaaggggggaaaattgcattgctatgaagtatgaacaaagctaaaactagatgacattttaaaggtgtgatggagttgggaactatgtccaaagaagaaagcaatgtggcaaaaagtactacttcagaaacagacaagagacaagggaacacaagacaccaaattgcacaagatgaagatataaggttggtttggtggggaagggagaagggaggaggggaagaggtcgtgggttcgaatatcctgctaacaaaaactaacaaactaacaactaataactaacatcaagatcaatatcaatagcatctttaactcaagttaattggggaaactaacaactaacataagacaataaaaaaaaaattgcacaaacagtcaaataaaccataaagaaccaatcaaggtttttaaaaacagctcgtaactgcaattgcagccacaacaccgaggttttaggggtctctgcaaccacatcacaagttcacaaccacaattgcagctgcattagccacatatgtctataatttcccacgatatcaatgatcgccattaaacatgaatgcaatttaaaaccttggaaccaataaataataataatttttaaaaaaaagaagatatacaaagcaattaaacctcaaagcatcgaacaatagataactatgatgatttctccaccgataaaattttctgattgataatagctacatgataaagaatcaagagttctaaaaacctcacgtttaagttgttttcaagttcaacctagcccaacagaatctctccaataatcccaatagagtgttgcatagtaaacacgtataatagttaccattgacttcataaattttcatctacatttttcacaaagacaacccaaaataaaaacttgtttttgataacgtaaagcttaagcagtagagaaattgaaagaaacccatatgtgccctcgccaatttgctccaatttctcgaagcaatcaacacttctggatccccaaatgggtgattcattcacgttcagatgccctggggctgcaattgccatggctccctaatcttccaaggaacgaaactcgaaggcaacagcgaatcgaatgaatcagggttcctctagggtttctggcgcgcgaaatttatccagaaaatctctcacaaaatagataagctgatatttgattgctttaaactgaaaattctagtttagagaaaaataaaaatgtgtgatcattgaaaaagaatatcaagattatgatgttcaccgtacgattcgctcgtaaattcgatttcacccaattagacttttttatttgggccgaacccaattcaatttgtttaaatctgtttatgtacattgggtcacaggctttgctttttaaccgtattaattgaatttatcttttagttgttatccaattttattgtacaactatttctatattttttttatgtatacattacaaatcaatgaaagacattgacttttctattattgaaatcaagtacttcttaaacattcactaaaatgtttggatgatgcaccaagcaagtgccaaagtgagaaatgctaagattaggattgatctaatgaatgaggtttaaagtaactttaaagagatttttttttttttactttaaataatagtataatatattagttctttttgtcaatattatgatatattttgtccaaatatgaggtattttttgctttataaaaattaataattttttttttgatggacttaaaatttaaactttaacttatttaacttggatcgatcttaggtcacattgtcacactctttgaagcttcttttaattggaccaaatcatcatatttttaaaactaatctcctgttcaccaattgtttaagttttgtgactttatattttcttgactttgttttattattattaagaaccaaaacatagtctacccagtactgcagcctcagctttcatgggcagtgttttgtgtttgacaggagtgtgtggatcaccataaagaggttcaactcgtaagcgtagatcgtgaacgaacacactcaacaacttctccatcgctgcaaccaatgctctgcctccactttgcttttaccactgtcatctttggtacttctaacttttcaaaatggaccataaagtacataggttgatagggattcacgttttggggaacgaggaaagtttcatgctttagcaagacatatgtttttactatctttaatttcagggttacatttttgaaaaaaaaaaaaaagaaactttggaccttcttgagtccatcgttttagttcttaataataataaaaaaaaattacatagtgaccaatttaaagaatatgatgatatgattcaatagaatcaaatgtgagtaagattgtgaaactaatatttctctaaaagaaaaatactaaaaaaaaaaaactttgcagcaaaaatgcctcataaaattaattatattatgtggcaatataaaaacatattatcacataatatgaaattgcctctaccgtgacgaattttttaattatataattgattaaataatactttgaaatcttttttcaacacatacacttatgttagagagaaggtatgggcctcttcaagatttttcttttagaaaaataaaattatgaaaaaatttaacctcctgtttctataccattatttgtttttacagtttaaaccccaccaatatattgataaaaaaaaattgatgataaaaaaaacaccaatacaatccttgatggtcaatactataatgtttggtaaagatagttgactttgactttgaaacacaattcccatttgttttaaggcgatgataccactaatctaattttcatataaggataatgggaggaataccatcattgttctctttattctttagtttaaagtgaaacttcattagaaaaagttaacacaccaaaataataagtgatgcatttagttgaggctctatgaatccagtgcaattctataatgtcacatggtgtcatggtccagtgcaaggataaagataatgtagataaatgttgaatatttttatttcatagccatgctaaagccatttcgctttcttggctacagagccaattaaggtgcttccctgttctgtggtgatatagtcggcaggtcaataggacataaatttatgcaaaatgtgcaaacattccaatttaataactaataatgtgtaatccatccatcactttctggtcaaccacttttctccccctcaattcctcataaaataatagttttatagtaaaccaaattaatacatgggtttgttacatatatatatatatatatatatatatatatgttaatcataagaagtttatcgagtaaaacaaaacaaaattttatattttttttgttattatattactaatatagagtaatcatcaacctttgtgtatgactaattttatttaaaaatctgatttataattttttttgattttttttttcaatcatcttataccaacgacttattaatataaaattttatatttgataggtaattataatttataagtttgaatcctcgcttatctttttgactgtgctaaatataattttttataaatgcttttttaacctagaaacctttctttatcttgaacctaacatattctttcccctaaattttctgcaccaaaaactccttaatatttaaacataacttattttcgtccacttaatttttagtcgcccacttaatctcgagttgtccgttaaacatattatataagtgaaaatttacacgcgcaaagaaggtacaaaaaggacaaaagtaaagcccactacgataacttcagattaattgtacaagtataaaacttgggagattgcaatcaaactaattaaaaattgattgatgataacatattcacaaaggttcatttcatactgttagtaatttctgttgccacgaaaagaatagttgatagttgatatgtgcctagcacatgatgtttctaagcgtaattagatcgttaaatgcatcattttatatgataaaatagcttccaatcggtgtgaatgtaatttatgagcttcaatgaggtatttggtttagattgactgtttagcaggtgaatagctaaggaattatgcagagaagaaggtctggcgccatcaagcctatgtacaatcgggggtacataggctagttctgcatgatggcgccatcagcgccagtcccgcgcctggagcgccaccgtctctggaccttggtgccatcagcgccagtcccacgccaggagcgtcacaggtcgcagaatctgcataatgagggcaaaacagagatttcacgggctactctataaatactgaagcctcagcactgaagaaggaccttttggacgaaaatcaccaccaaaggaagagaaagagagcttgggagttgattctagggattgggtgtgaggggaagagggaaccctcttcttctttgcatatcagcaacatgcttctttttgttgtaccaaggccagccatgtttaggtttggctactttccttttgtatttagggcaaatgttccatataactttcatttggaatggattgaatgttattgttcattaatgctatgttatttcattacactttgcttgaatctctttatctctttcttagacctgatcaatctatttaagagcttagagctagggttcacaatagggatattggggctttagtcttggaactaagtgtggtgacttgctttacatcacctagggatagggatgtatgcttgcaatcctttctagtgcatcacttaatgcttaatctaataaatgctactaagggattagagtgttgaaaagggttaaagggttaatgtcactaagggattagggcttaactaacattgaatgaggatgcatgattgggtagctagtgtagatgaatgttgcaaacaatctatgtaagaatgttaggagcatggagtgtgggttccctagctacattagcttacgtttggtgcaaccattatctattttatttataatgctttatgtttatatttagcttttaatttacttcgcacaacaacacatttctcttaatcttttgtcatccaacctattgatacgatttatgatttaattggccaaacaatcctcgtgggacgataactctattttattactttattacttgtacgaccggtacacttaccaagttcgcaacaatagtaagtgcttaatttgtgtgcttggtaaaggaagtttttggatcagaaccagcatagttcacagtcctaggttagcctaacttgcacatacaggattaataaatgagtagtttaaaatataggcgaagcttcttacaattatgtaatttaaatcacaataatttttatatgtttgcatatatttatttatagtctttattgtcaattttttaattaataattataacttgttattttattcattaaatcttttgtgtagaagaatcaaatttaaccccctgtttaagctatgatactaagaacataaattcctatcctcacaattatgactcatgcattatcaaaatttataaacgacacctccaattttattttatttttttcgtctacatgatgtactgttaattactctgtaattaaacggaaggctggaaatttaacactaaaaccctttattgagagtnnnnnnnnnnnnnnnnnnnnnnnnnnnnnnnnnnnnnnnnnnnnnnnnnnnnnnnnnnnnnnnnnnnnnnnnnnnnnnnnnnnnnnnnnnnnnnnnnnnnnnnnnnnnnnnnnnnnnnnnnnnnnnnnnnnnnnnnnnnnnnnnnnnnnnnnnnnnnnnnnnnnnnnnnnnnnnnnnnnnnnnnnnnnnnnnnnnnnnnnnnnnnnnnnnnnnnnnnnnnnnnnnnnnnnnnnnnnnnnnnnnnnnnnnnnnnnnnnnnnnnnnnnnnnnnnnnnnnnnnnnnnnnnnnnnnnnnnnnnnnnnnnnnnnnnnnnnnnnnnnnnnnnnnnnnnatccctttaaatttcatttatgattatctctcataattattttgtggattcaaatttgaataactttcattcatgtggataaaagaaaacaagtattatttatgacatcattttcgaattgtcatttttctttgttgtgacttcttattatttgtactcttaaaatttttgaatttgtaatgttgtctataatattttagtgcaatgactcctttttctctaaatgattacaatattcattagctgtttgattcttatccaataacaactttttttgtttacttttataattatctattgactaagaaatatattcatccattatatatcttgttttagaatttatatgatcaccctttgtttttcatcaatatatattataatattcaatcctgtttgactaagaaatacattcattcattctaaattttgttttaaaatttgtatgatcaccctttaaaggtggaacttcatacttctttatgaaatcaactagtatttgagattgtagattgaatcaattcccaccactatactgaatgaaaccccaccaaagatgttatgggtagttgttgtgattaaaaattcaatccacattgatttgacattccaaatggatttcctatttggcaaatatctgggtgaaaagaattatggaatggaaacataggaaagttcctatggccgagttaaaagaatttgaagcaattggaagattttttataaattgaaggtttagaattttgcatctaattttaaaaaaaatagattatattgattgagatgcaatccttaggaaaataaagggaatataaagttgagaatttgagaaaataaatagatacaagaagatgaaaaatgtttgacgtaaaattgtatataaaatgttatgaattaaggtatttaaaaatgagtttaattttcatacatccaatcaattttttttctaataagaaattgatatgtatggtattttattttcttttacaataatacattaaagttatccttataataattttattgaattttacattattaattaataaatttttttataaggatagcttttaaagtattattgtaaaattcattaaaatacacgcatgtcaattttttattcgaaataattgatcggatgcaaaaactttttctttatttttacaggtgctaatttgaccgtttgcaactttgcattccttgtatttccggacccttttcctactgtttacattttttactgttattttaataagtatttcctattatttttgtattctatttcctatacatttttctatttcttaccatacagtatagaatagaaacaaaataggataaatttacgtataatttattatgtgcttttacttcggtaactcacttcgtttttctcccactgaaatggtaaatcacacaaaaactgtcacattaataatcgacattactagttcttaaaaaaatacattagttatttgagttaaaattcgaattttaattaaaaataacacaaaaaaaattacaaaaggtgctatcccaaagttgtatccaacaaagattgatggtggcataaaagtcgaaagagacgcacaaaattaaatagaaactggtgcttatccgagcaaccggtgttatgacgtcatagcaatccttaattgcctccccaatgtgataaacttgctactaaaagcacttattaagttgttttccgtgagcaatttatgttaaacttgttcttaaagcagtaaaaatgacgtaccattataagcatgaaaactatataagcttaaaagaaagtatgaaaaaaatatataaaatgatttttatcaactcgttggatatttgcttttattggagtttttctaaagtagaaaagggatgcatgcatgcatctgattctctttatgccacttgtaagtttgtagttcaaaatagataacaacttaagtttctgagtacgttttctaggtactaccactttgatcatggtctaaccctgacttttacactttggcaagccaagaactatactatatattaactaaaacgcaattagactctggtggttagataaactgaattgaatttctccgataagttaaaatcgacgtatccacttcaactttcagaaaacttaaatgagggcatttctataaaagttaaatatataaattgattttaacttatgaaagaaaaaactcaatttattttattttttattttcctttcctttaattagttacggaggagtttatatacccaaaagagccttaatttttaattattttatttccaaaagaattagatacttcaaatgcaatagttgaggaatgtttagttggtagtgtacagtggtcctgcatgctaggcaaatgagggtcaatctatgatgaaggaattgaaggtcttcggttcacgaacactctaatgccaaattaagtcaatggaataagctagataaggaatgaaagtgagggtgtgagagacagagagggaagagtgatggattgatattactacaaacaaatggaaggttggttggtggtggtgtcaactttagctggactacgttttgagtataatcatgtatttatccttatggttgtgatgagttgacttgtgtattgatcgtggatcatgcaaatccacatttggttgggaaaaaataattattaagaaataagaatagcttgattaaatgtcctccaagcaagtaatcattatttagttttaacacaatacatttatcttgtatcttaaaataaatagtgtttgtagtcaaagtcacataattcatgaaagaggtcaatcccttaaataaattttaatatctcgagagaatagtccttgatttttggccaaaaaatatcctgactcaccaaaaaaaagttacatcactcacacaatattaatttattgtggaaccttttacatgggtgaaatactagataactaagaagtcgttatatacttgattgttttgcttaataataatccaattgcatattttgctccctaattgcttcatgatcaagtttaatcaggtgtgcatttttatctaggcattggtttttccacaagttgataaggcttctttagtggaggaatagtactcattgacaaactcccacatgggtctgcatcacattttggcaccggtatattgactcttgatgtgtggggaacccaaaaattttgcattattctgatgaatttctcttctagtaaacaagccatgtctacaaagatcaatcatggacggttaagattttctgctgaagtttctaatctatgactgataccaccctacacaattttgataagatctgcagctaaaccttttgtccaaagcttcatgtgtggtggtgttacggacccttctaattgtagccaaatgaactgtaaagtgtaaaagctataccttaaaattccttcttgtgttaaggtaaaaacagttgtgtaactgatgcaccattaaaactcagcaaaagtaaacccgaagtttgatagtaaaaagactcctcaagagactttttgtacaattaggcagcttgtcggcaagttgggcataatagaccccacctttgattaatgggaagagaaatgctgcttcatatatagttgccctctttaaaactacaatgcaccaacaaacctttttgtggtaaatttttgggtgaatgatatctcactcagagtcaaagactaatttcttgataattaatatttatttaaagaattaatctctttcaataaatattttttcatatataaatttggaaattaaacctctcgtcacatgttaaatattttttcatatacaatatacaaatttggaaattaaacctctcgccacatggtgaagaaacaaaattatctgtcaatcatatcatatcataccagatgattatatcttttgtgaaaaacacaagcactaggtaataccaccaccaaaataccattattaaaaggctttgtacaaattgttggcccttccaacaaccctttgtttttctctgtaaagttcagagtctccaatattctgtcttactccaactagctgagaaccatatatatataataattaatctaagttctaggtagcaaaagtaaaccaaagatagttgaagatgtggcgtcttctagctgcagtggcaagaaaccttcagaacacaagaaagagttccaaggtggcagatgagagcatgtttgaagcaggaaacggtgtagagctatttggacatgagaggggcagaagacaatatggttgggggcttgtgtgtagcattcttcaagcccccatatcaatactctcatgtgtttctcagcctcaggttaataatggctctgatggcgtttgggtaactggggaattctcacaagtgtctgaaatgaaccatctcatggtaagtgatagcatgaggtatgcaattttgatgtaggaaatattgtgaatatcaattattgctcttggtttctaacttctaaagacaacaccatcgcataactctctctcttgtcctcatttttcttttctcttctctgtttacagtttggatcatatatatgtaatacactaggtgattgaatagatcagccaaagttatgacctactttttggtgtgtatttatccccccnnnnnnnnnnnnnnnnnnnnnnnnnnnnnnnnnnnnnnnnnnnnnnnnnnnnnnnnnnnnnnnnnnnnnnnnnnnnnnnnnnnnnnnnnnnnnnnnnnnnnnnnnnnnnnnnnnnnnnnnnnnnnnnnnnnnnnnnnnnnnnnnnnnnnnnnnnnnnnnnnnnnnnnnnnnnnnnnnnnnnnnnnnnnnnnnnnnnnnnnnnnnnnnnnnnnnnnnnnnnnnnnnnnnnnnnnnnnnnnnnnnnnnnnnnnnnnnnnnnnnnnnnnnnnnnnnnnnnnnnnnnnnnnnnnnnnnnnnnnnnnnnnnnnnnnnnnnnnnnnnnnnnnnnnnnnnnnnnnnnnnnnnnnnnnnnnnnnnnnnnnnnnnnnnnnnnnnnnnnnnnnnnnnnnnnnnnnnnnnnnnnnnnnnnnnnnnnnnnnnnnnnnnnnnnnnnnnnnnnnnnnnnnnnnnnnnnnnnnnnnnnnnnnnnnnnnnnnnnnnnnnnnnnnnnnnnnnnnnnnnnnnnnnnnnnnnnnnnnnnnnnnnnnnnnnnnnnnnnnnnnnnnnnnnnnctaacaaaatcaaactaacaataaagaatgtgttagagtgcatgatgctagctagcctttttctttctttgattttaaccactatcacgaaaaaattatttgatgatcctgaaatatcaaatatttagagttttaatcaatttttatataacatgcatttagattttttaatttacagagaaatagtaacatttgattattcatatgttatgtgatgattaattaagaaccaaatagtttaaaactatcaaataatttctccttccactccaaaaccagaaagaatcatataatcaggtgatttcacacagcatttgaggaataataatgcttggattactaaatgcatcctaatcttgtgagttcatcaaacaaatgaagataataataaaaaatgctaagatcggagtaataattcatttaggggagaaattaaatataaatataattgcagtaataaaataaaatacataaaatttatcgttttgcttaaggtggtcctaatcagggctgcgcaggagggcaccaacatatatagaatataattcttggaaagcaattggtgatccatcatgagaaccctaatagttgaattcatttaatataagggtacccacagaatgccatattcaaaaaattgaaattattgatgcgaatgtaaaagtgattttgtacgtcatttgctgttcatgaataaattaaagaaaggattcaacagtataacacgtgaaaattattaagggaatatataaatatatatatagttttcactatcagcttagatttttggatattacctattgatttagtttctcttaatttcccattcttttcaaaagattttcgatacagcttattgattacacttctccaaaagtcgtctctctaagggaactttgatcttaaggcttgctaagtgaaataaattaatcttaattatataactacacacaaataattttttttacagcaataactatacacaaatattgaatattactttattgaatctaatttttatcaccgattttaattatacgatcaaatctaaattcttcatgtcctatcgtctttctcttaatgtgttatatatgtgcggcattttggtatgtgagaggcattatcgttacaaactcgtgacctactcatttctccactattgcaactacctaagctctaactctctctgcagctttattttcgatagtgctaaggttgcactttttactgaattttcaataaaaaaaaaaaaattcgtagtgtacaattgtatacaattgtccacatgcaagtcactaattcatgcaagacaatggaatcaatatatattgatcagcaattacaaaaaaaaaaaaaattggtttagttaggtggctaggattcaagtttcttaaccatgtaattttaggttcaattttgaattttgtttgcttatgaaacaaaatattttgagaagtatattcttatcattatcattaaaatctatttatattttacaaaataagtattttaaggattaagtaacccaatatatactactaaggaaatcattttgttaacccaggttatgtttaacaagattacctaaaaaattaccttgaaagttggaaannnnnnnnnnnnnnnnnnnnnnnnnnnnnnnnnnnnnnnnnnnnnnnnnnnnnnnnnnnnnnnnnnnnnnnnnnnnnnnnnnnnnnnnnnnnnnnnnnnnnnnnnnnnnnnnnnnnnnnnnnnnnnnnnnnnnnnnnnnnnnnnnnnnnnnnnnnnnnnnnnnnnnnnnnnnnnnnnnnnnnnnnnnnnnnnnnnnnnnnnnnnnnnnnnnnnnnnnnnnnnnnnnnnnnnnnnnnnnnnnnnnnnnnnnnnnnnnnnnnnnnnnnnnnnnnnnnnnnnnnnnnnnnnnnnnnnnnnnnnnnnnnnnnnnnnnnnnnnnnnnnnnnnnnnnnnnnnnnnnnnnnnnnnnnnnnnnnnnnnnnnnnnnnnnnnnnnnnnnnnnnnnnnnnnnnnnnnnnnnnnnnnnnnnnnnnnnnnnnnnnnnnnnnnnnnnnnnnnnnnnnnnnnnnnnnnnnnnnnnnnnnnnnnnnnnnnnnnnnnnnnnnnnnnnnnnnnnnnnnnnnnnnnnnnnnnnnnnnnnnnnnnnnnnnnnnnnnnnnnnnnnnnnnnnnnnnnnnnnnnnnnnnnnnnnnnnnnnnnnnnnnnnnnnnnnnnnnnnnnnnnnnnnnnnnnnnnnnnnnnnnnnnnnnnnnnnnnnnnnnnnnnnnnnnnnnnnnnnnnnnnnnnnnnnnnnnnnnnnnnnnnnnnnnnnnnnnnnnnnnnnnnnnnnnnnnnnnnnnnnnnnnnnnnnnnnnnnnnnnnnnnnnnnnnnnnnnnnnnnnnnnnnnnnnnnnnnnnnnnnnnnnnnnnnnnnnnnnnnnnnnnnnnnnnnnnnnnnnnnnnnnnnnnnnnnnnnnnnnnnnnnnnnnnnnnnnnnnnnnnnnnnnnnnnnnnnnnnnnnnnnnnnnnnnnnnnnnnnnnnnnnnnnnnnnnnnnnnnnnnnnnnnnnnnnnnnnnnnnnnnnnnnnnnnnnnnnnnnnnnnnnnnnnnnnnnnnnnnnnnnnnnnnnnnnnnnnnnnnnnnnnnnnnnnnnnnnnnnnnnnnnnnnnnnnnnnnnnnnnnnnnnnnnnnnnnnnnnnnnnnnnnnnnnnnnnnnnnnnnnnnnnnnnnnnnnnnnnnnnnnnnnnnnnnnnnnnnnnnnnnnnnnnnnnnnnnnnnnnnnnnnnnnnnnnnnnnnnnnnnnnnnnnnnnnnnnnnnnnnnnnnnnnnnnnnnnnnnnnnnnnnnnnnnnnnnnnnnnnnnnnnnnnnnnnnnnnnnnnnnnnnnnnnnnnnnnnnnnnnnnnnnnnnnnnnnnnnnnnnnnnnnnnnnnnnnnnnnnnnnnnnnnnnnnnnnnnnnnnnnnnnnnnnnnnnnnnnnnnnnnnnnnnnnnnnnnnnnnnnnnnnnnnnnnnnnnnnnnnnnnnnnnnnnnnnnnnnnnnnnnnnnnnnnnnnnnnnnnnnnnnnnnnnnnnnnnnnnnnnnnnnnnnnnnnnnnnnnnnnnnnnnnnnnnnnnnnnnnnnnnnnnnnnnnnnnnnnnnnnnnnnnnnnnnnnnnnnnnnnnnnnnnnnnnnnnnnnnnnnnnnnnnnnnnnnnnnnnnnnnnnnnnnnnnnnnnnnnnnnnnnnnnnnnnnnnnnnnnnnnnnnnnnnnnnnnnnnnnnnnnnnnnnnnnnnnnnnnnnnnnnnnnnnnnnnnnnnnnnnnnnnnnnnnnnnnnnnnnnnnnnnnnnnnnnnnnnnnnnnnnnnnnnnnnnnnnnnnnnnnnnnnnnnnnnnnnnnnnnnnnnnnnnnnnnnnnnnnnnnnnnnnnnnnnnnnnnnnnnnnnnnnnnnnnnnnnnnnnnnnnnnnnnnnnnnnnnnnnnnnnnnnnnnnnnnnnnnnnnnnnnnnnnnnnnnnnnnnnnnnnnnnnnnnnnnnnnnnnnnnnnnnnnnnnnnnnnnnnnnnnnnnnnnnnnnnnnnnnnnnnnnnnnnnnnnnnnnnnnnnnnnnnnnnnnnnnnnnnnnnnnnnnnnnnnnnnnnnnnnnnnnnnnnnnnnnnnnnnnnnnnnnnnnnnnnnnnnnnnnnnnnnnnnnnnnnnnnnnnnnnnnnnnnnnnnnnnnnnnnnnnnnnnnnnnnnnnnnnnnnnnnnnnnnnnnnnnnnnnnnnnnnnnnnnnnnnnnnnnnnnnnnnnnnnnnnnnnnnnnnnnnnnnnnnnnnnnnnnnnnnnnnnnnnnnnnnnnnnnnnnnnnnnnnnnnnnnnnnnnnnnnnnnnnnnnnnnnnnnnnnnnnnnnnnnnnnnnnnnnnnnnnnnnnnnnnnnnnnnnnnnnnnnnnnnnnnnnnnnnnnnnnnnnttactttttaaggtgaaaaagaaaagttgtggcagttttaatttattagaaaagatgatggaaaaataaaaatattatttatgaaaatagtcaaaattaattatgtgatcaatgaaaataaaaacaaaatataataatgttaaaaaaatttagataataaactacttttattttcactaccttaatggttttaaaaacgttttacactcctaaatataatatgccttctccttgacggtgtgtttattttaaagaaaaacatgaaaggaaagaaagtgaaataagaaagaaaaaaaatagaagattaatgagatgattttttaaattatttaaaatgagaaaaggatagttaattttttctcttctttaattatgtaaaaagaaaatagaataaatataaatactatctataaatgaaaagaaatatataaaaaagaagacaatttaatctttttgtaaaaaaataacactcatttctttacttttccttccacttttagacaaattaaaaataatgtgaatctagttagccacttgcacttcctttatctcacgttatactttgtacttcattcgtgattaattataagattttttttaattaatttatgctttttaagaacaataattaattttattaatcatattaaatctattaattaattatactatctttttaaaattatcattttcttatctttctattnnnnnnnnnnnnnnnnnnnnnnnnnnnnnnnnnnnnnnnnnnnnnnnnnnnnnnnnnnnnnnnnnnnnnnnnnnnnnnnnnnnnnnnnnnnnnnnnnnnnnnnnnnnnnnnnnnnnnnnnnnnnnnnnnnnnnnnnnnnnnnnnnnnnnnnnnnnnnnnnnnnnnnnnnnnnnnnnnnnnnnnnnnnnnnnnnnnnnnnnnnnnnnnnnnnnnnnnnnnnnnnnnnnnnnnnnnnnnnnnnnnnnnnnnnnnnnnnnnnnnnnnnnnnnnnnnnnnnnnnnnnnnnnnnnnnnnnnnnnnnnnnnnnnnnnnnnnnnnnnnnnnnnnnnnnnnnnnnnnnnnnnnnnnnnnnnnnnnnnnnnnnnnnnnnnnnnnnnnnnnnnnnnnnnnnnnnnnnnnnnnnnnnnnnnnnnnnnnnnnnnnnnnnnnnnnnnnnnnnnnnnnnnnnnnnnnnnnnnnnnnnnnnnnnnnnnnnnnnnnnnnnnnnnnnnnnnnnnnnnnnnnnnnnnnnnnnnnnnnnnnnnnnnnnnnnnnnnnnnnnnnnnnnnnnnnnnnnnnnnnnnnnnnnnnnnnnnnnnnnnnnnnnnnnnnnnnnnnnnnnnnnnnnnnnnnnnnnnnnnnnnnnnnnnnnnnnnnnnnnnnnnnnnnnnnnnnnnnnnnnnnnnnnnnnnnnnnnnnnnnnnnnnnnnnnnnnnnnnnnnnnnnnnnnnnnnnnnnnnnnnnnnnnnnnnnnnnnnnnnnnnnnnnnnnnnnnnnnnnnnnnnnnnnnnnnnnnnnnnnnnnnnnnnnnnnnnnnnnnnnnnnnnnnnnnnnnnnnnnnnnnnnnnnnnnnnnnnnnnnnnnnnnnnnnnnnnnnnnnnnnnnnnnnnnnnnnnnnnnnnnnnnnnnnnnnnnnnnnnnnnnnnnnnnnnnnnnnnnnnnnnnnnnnnnnnnnnnnnnnnnnnnnnnnnnnnnnnnnnnnnnnnnnnnnnnnnnnnnnnnnnnnnnnnnnnnnnnnnnnnnnnnnnnnnnnnnnnnnnnnnnnnnnnnnnnnnnnnnnnnnnnnnnnnnnnnnnnnnnnnnnnnnnnnnnnnnnnnnnnnnnnnnnnnnnnnnnnnnnnnnnnnnnnnnnnnnnnnnnnnnnnnnnnnnnnnnnnnnnnnnnnnnnnnnnnnnnnnnnnnnnnnnnnnnnnnnnnnnnnnnnnnnnnnnnnnnnnnnnnnnnnnnnnnnnnnnttattattaatgtttgaagaaaataattaagtaaatatatgttgaagaaaaaaaatcaatgcatctgaaaattacataattaatttatataaaaagagataaataaatttctaaaataattttataattaaagattgattacttcggaattgatagaaagatatagaaaattatgttttccttgttttgtatttcattccttcattcatcaacctagcaattgtgagaaataaatataaatataaatgcaaaaatgaaattattgatgtgctcagtcatgagcacaggtggtaataactgttacctgtacaattactgttatccgtaataattgggttctgaattttccttggtttaatttggtattatctattccgttgattgacaattgacattagtaaaccaacatttatagaatgcgttgaagtcttttttttattttttattttgttatattattgtttcgaaccctatttctgtactacgtgggatacatataattacaagtttgaatgaccgaaaaactagagaaaatgaatagttctgtcaaagcacacaagaatacattatggtaaataataattaaacaccctgcatacgtggacagcgtctgcaacactaattttcagaaatacacgattcatttgtacgttaacacattgttttaccatcgatatatactctcaaatcttgttcgaatttagtacttttagaattattatgaatgagaaaattttatctttaaatatttcatactattatatatacatgaacctttataactcaatattaaacttttattcgagtgaaaaaaaggttgaataaatttctttaaaataatacaaaaaaattaaggcaatctatgttggttcttcatcatccatttgaaactggttttcacaatcaaaccatctagttcagttctttgttagaagtaattaatggttcatcattcatgtatagcatgcatgctagaatccgcccccagtatcccactatcacaagaaagttgaagttgcaatctaacatttcctactagctactaccaacttgctttgtggcttaatcgaaacaatggaaagactttatgaactctggctaccatagtacgatgaattcttgtagtagcaaatcaatgactgggatggtgctaacaataggcatcaacaagcgaacgattttctctcttcttgatcatgcaccgagttttgtattgtcttcatcaaactttcttaaagataaattctttttcgtgaggtaattgtatgatttttcaaggtaaaggagtcccggatcaattaacaacaaagttttaataaaagtaatccccgaaccatattcttctccaatctgagttttgctcacatctaaaaagcctcctacccatttatttatgttaccatcttctgttataagaactagaataaattactgtcagatgcaacaaaaaataaaggttgcatagggtatatatattacatttccgtgattctctattaatctcatgcaactatccagctaaactttaaatcaatctatttggagtattctaaaaaatttgttgcatagattagtattctattttatgttttctagagtttgagagtaatgaacctgtgattctgattcctgtgtgaggttaattattcctattttctgtaatgagatgcctagttgcctatcagcttcttcatattcatatcaaatccaaacatttcaattgacttaattaatatctcaaatctatgatgcacggatattccaataaggaattgttgccatgtaatgttagataagatgcaactctttaaaccctaacggaaaagttcaaacttaaatttgttgcactgcccatgctccattgtgagtttcattctctctacttcaacacttctttcaattaatttgcaacccttaaaaaaacaattaatttaattaatcatattaaatttatcaattatttatattatcattccaaaattatcattttcttatctctctatctacttaattgtttttttttaatatttgaatagaaaataattaaataagaacatgtaagaaaaaataattaatatatttaaaaattaaaaaagaatcttataaaaaaaaaaaaaaaatttgaaaatagttttataattagagacacaggagtactcttttacttaattacagcttgagttcttaggacctctaaggtaacggactaatggctctcttagctgcatcagttctttatttgtcttcttcctcccttctttacttctttcataactttttcctctcttctgtgtttctttctacaagaccagttctccatttcaactttcaattagattcagccagcagtgacaagagaatgcacctggccacgaagtactactgccatgcaaaatccaaccaatacctcaaatgttgcatacaatttttcaaatacagttatgaatggagggattactagggccagaaaacatctgattcgagggaaaagaataccattgtatgtatatcatgcctcaaaaacctgagcgatcctaattattaatcggttgaaactagaaagtagaaagtatgtaaataatgataaaaaaaaaaaaaagccagggctaaacaaatttggtatcagattttgaggaatttaacataaatcatataacctgacactaaaaatgacagaagagacacaaaactgataatgtcaagttccaaacactgcccatcaaagaaatcaaagcaaaagacaccaattgataattttgcatgccacaataataataaataaataaataaataaaatttttgccaaaaagataataaaccacaacagattaagataatgtcaagttccaaacactgcccatcaaagaaatcaaagcaaaaggcaccaattgataattttgcatgccacaataataataaataaataaataaataaaaattttgccaaaaagataataaaccacaacagattaagcttacaagaaaggatgtaaggaagctcatagggaaaattactaggtagatgtatgaagcaaatcccttttaactctgataactacaatatgtttgttgcaatgactactgtccatggccaatatggtactggcattaaacccccaagccatcatgaagtaagcagtccatttctcaatgaatttgagcacattctcaacttgatgagagaatacagcaagaagtgcataaaacatatgatattagatcatggcagatgacaagaaagtaagaaagtgccacatgaaacatataactgagagcaacgatttcatatcacctcttattctgcaatcatattcaaatctctttgaatagaaaatcacgtagataaattagtgacactaacaactactttatcaagattcaaaatcaatcaaaattgagtactgattcatgaataatctgatattattttttattgtgtgatgacaatagcacaaaaagaggataagaagcaaagcttctaacattaacgattcagtatggagaataaaataatgtataaaagctatgccaaatatcatagcttatgtcaatctagtgtgatgaataatacaaggtggaaacatatttgatttcccaatgcttccaccaaaagaagaaaaggaggaggggaatagagatacaaggatttctaacaattaaacagataaactaaaaccaatgcatccaatgtagcccatttttccaataaatgaatagaaatcatattatccttaccaaaattggatgaatcattctacatctttaacacattattggaccttgaccaattctccttaaatgaatattctattgattttcatcataaaatccttttcggaacatttcttcaagccaccgcctagcctcatgtttcctcccatgaaatgagaaaccacgtaccatgatatcatatgtccaacaattaggttgataacccctttgacacatccgagcaaacaacaaacgagctttgtccatatcactgttggctacttgtttcagcaacaaattgtatgtgaaaatattaggtggaaagcacttctctactaatctttccaggtccgcaatataatggctcactctgagacgaccagaaaatgctccaatcatccagcaaagtgttgaattaccagaaaataccccctcttccacacctcttaaataaatgcatgtatcgtagagttgcggtgaaatcaaagaatgataaagaagtacattgccaacaaaagaacttagtggacgtcccattttctgagatacattaatgatatgtattgcttcactatacttttgcaatgagcaaagcttttgcacaagtagctcatagcattcaaggcttggattcaatccaactcttaacatgcagaaaaagtactcacgtgaaatgtctatcttattgaacttgcagagaccagtaatcaaggcaacatataacttcttagttgccaaaccctggtgccgtacaccattaaaaaaattcagagcatcagaaattctcccattgaataaataaccatgcaacataagaataagagaagacaaattgggcttaataccattcctttgcatcaactcaaatacttccctagccaactcaggcttcatagcatgtccagctccgtcaaggaaaaagttgtaagtctgacaagaatgttgacaacgagtcagcatctccagtagattgaaaaagcgccctcttgaattatccatttcaagcaagcggcaaataacatctctacagaatggacgaatcagcttatgacccttccctttcatttcaacaagaagccgagcagcaatatctcccctaccagacttaacaaaacccttaatcatcttaacatacgatgtcctggcagcaacactcttaagttccccatgtaccaaataaccatcttccactctcccagcccggcacagagccaatatgtacttgtcatacattgacgtaggaagcacaatattatgccccacggcaagatacaacaactccttcatctcatcaatcttgtgctccctgcacaaagcactcgcaagcgtgcaaaatgtccgcccatcaggaaaataactccgctcagccgagcttctgagcaccttgaacgcttcctcagcgcccccatcccagcacaaagtaagtatcaaatacttgcaagccaagtgactgagagacaacccaaagtcagacctcgaatggtacaactccaacgcgacatctgccatccccactttgcaaaagaagcataagacagcattcatggtaaccacatcaggaggaatgcaactctcattcatatccaccaacaaatcatacacctcgtgaagccgattctcctgcaaaagtctacaaatcaaaacattatacctaacagtggcaggaaaatacccttcagagtccttcttctgagagaaaaactgcaatgcctcatccaccctcccaccccgaacaagaccctttatccaaaccccataagcatgatccaatggaaccaacccagagctcccgacttgcttaaccaactcaaccgcacgctcaaacctataactctcacacaatgcatcaattaaaaaactcacttcaggcccttttaactcctctccacgacacatcaaaccattgagaaaaccctcagcctcctccaaccttctctccttgcacaaatgcttaacaacaatgacatttgtcatgtgattctcgaagcccctggcgcgaatttgcctcacgatgatgtcaaacgcgttgagatagtttttctcgacgagggcgtccaacaggacgtggtaggcgaaggaatcaaggtcttggccgtggaagcgcattcggccgaacgcgtgaagggcgttttggggttttccggcgatggcgtagccgacaacgaggatgtcgtggaagcggacgcggtggtggaagatgcggcggcggaaggagtcgaggaagtcgaggacgaggggcttgaggtcggcgcgggcgaggattttgaagatggcgacgaaggtggcgcgggtgtggaagaagtggggctggcggccggcccagtcgaagaacttgaggcaggagaggatgtcgcggcgggcggcgccgtggcagaggacgcggaggacgaggcgctccgataaggggaggcggagggcggagagcgcggcggataaatcctcgtcgtcgggggaggagatgatctggtggatgcggttcaggaggggatcgaaggggagctgctgctgccgcgccgccgcgaaccacgtcttgaaggaggacgcgacgtcgttttgggagatagaaaaggaagttgaggctgaggatgatgttgattgggagggtgatgatgatgctagagaagtgtatgcagcatggtcaaagcacgggtcgagaatggaggagatgaaggatttggatctgagacggtgtttagttacatgtttgagtgggagcatcatggatcaatggaattggaatgggaatgttcttcttcttcttgtggtggttctctcggtctcagggttccattgcattctaagtgtttgtgtttatgtctctgtgtgtatccatacctgcggcttctcactacttcttacatcgggtgttaagggtttatggggggtttcatcctccgtaaatgtctaaatgaacttaacctgttttgatcgactcactgcaccacccccatttgtggtttgaattaggtttagacattatcaatactactagaatagtagagtcaggtcgtgcagctcagatttactcactggatcaaaaagtaaattcatttgtcaggggaacttcaaagttcaaactcagtttgaaataaaaacaatttgatatcatttttttttttaaaagtacgtttgatgttaaaatttaatttgaaaactcaattttagaaaaataacaattgaaatatttttgtaaattcagtttataaacttaaatttaagtttgcaaattacaatccaaatatacatttggttgaaggagtgtttgtttctaatttcatattattttcacataatcacattgcgatgaatattatgattcgaaatgttatttttggatatatttaaaaatatttgtgattatattttaatatttttagaaatatcttttaaaattcaaaaaataaataataaaggaagtttatggtatttttgaaaataacttctcttatcctcgtgaaatatcttattctcgtattgttcatgggaacaaagtgtaaaagaatatattaannnnnnnnnnnnnnnnnnnnnnnnnnnnnnnnnnnnnnnnnnnnnnnnnnnnnnnnnnnnnnnnnnnnnnnnnnnnnnnnnnnnnnnnnnnnnnnnnnnnnnnnnnnnnnnnnnnnnnnnnnnnnnnnnnnnnnnnnnnnnnnnnnnnnnnnnnnnnnnnnnnnnnnnnnnnnnnnnnnnnnnnnnnnnnnnnnnnnnnnnnnnnnnnnnnnnnnnnnnnnnnnnnnnnnnnnnnnnnnnnnnnnnnnnnnnnnnnnnnnnnnnnnnnnnnnnnnnnnnnnnnnnnnnnnnnnnnnnnnnnnnnnnnnnnnnnnnnnnnnnnnnnnnnnnnnnnnnnnnnnnnnnnnnnnnnnnnnnnnnnnnnnnnnnnnnnnnnnnnnnnnnnnnnnnnnnnnnnnnnnnnnnnnnnnnnnnnnnaaaaaaagaatctgtagtggatgtgaaaagattttgctagtgaataatttgttatatgatattaaaaagatattactttaaaattaaataaaaaacttgaaaatttaaatttaaattttttgtttcttttttacatccaatcaacttcattatccgatttgattatctagtaataaagattatcaaacctacttattactaatctttccactcagttgtattatcaatttaaatgtgataaactcttttgccattataaaatcaactcaatttaccaaaaagaaactgattctagtcaaagacgtcatatattcttcataattagccagggaattttctgtgcagttctccacactatacaatctgaaagtcagaactcaacgtatagacatcttttcagctattgccgtcagcatcacctttctgtttctcagaggtaaggtaatcaatgtttttaagatttgagagttttgactctaaataatagttgaacgagttttagcataagggggagagaggacttaaaaaagagttccacacagcaaaactcttaaatgtagggtgttttttttagtacataatactcccttctcttttatataaaaaaaaaaaactcaaagtgtttgctcttaaaaataaataaaatttgattatttttattttcatttagcatgcgttggaatttctattaatttttatttttatttaaaataagtagtagtcatgatgaactcgttcccacacgagaaaagtaatggtgacgatgatcaagatgatcagtcaacagaagattattcttttctaaagaaaggaccatggacagcggaagaggatgcaatattggcagcatacgtgacaagcaatggagtgggaaattggaatatagtgcgaaagaatactggactagctcgttgtgggaaaagctgccgattaagatggacaaatcatctgagaccagacttgaaaaaaggagcatttactgaagaagaacaacgtaaagttattgaacttcatgctttactaggaaataaatgggccagaatggcacaagaggtttgttcttttttgttatagatgttttgtctcatccatgataaaagaagtaaatttcataaacaaggactaaacgtgaagttatttgagtccttcgagttgaaccagcagtggtcatgcgtgttattcagttgtatgtggttaatcatctaggtaaactcaggtcacagatacatccgtaacatagatcattgtcgtcataacctattctctattatttcctagaaacaacattataatcaatctaattcctttcttaaagttatgtataaggagaataatttccatttttgattcattaagggatagtgtttttatattatacacaatgatgtgtttcatgtagttttattgaattttgataatatattgacggtgaatacgtgaaacaaattaaagtatcggtgcttcgtaaatgtttacttgtgccttcatttgcatgtgttagatgcctggtcgcacagacaacgaaataaagaacttttggaacacaagacaaaagaaaaggaaacgtgctggcttgccactctacccagaagacatagaacaagtgttgaatgttgacagcccacagagtagttctcaaaatgcttccacccaacatgctaatgactcacaagtaggcacatcatctcataatgtaccagaattgatattcgacaattacaagcttgtcaatcgaaaacaccccgtgtgtgtaccacccatttcaatgatacctgctgaaaacgacagcatctttgaacaacaaggtaattcagataaccaaattatgcatccccccaagcagcaaattatgtatcgtccccagaagcagcttcatgactcagacatgctaccaattgattagtaagtatgagaaattttatgagcttcctatgttgtgtgtttatatttttatataacaaagtaatgtgtagtataaagtttcagggtgattacatgtcttgtggaacttcctcaatgtcagggccgcctccatttccatcatttgattactcattgagagtgagagaggatcctccgactgagactcatgatcagtactatgaaccacgttctccaggcagcaatggttttttggaatccatattttgcccaccaccaaagattgtggaaggatcagatgattgttccatgcaaggagagtcaagtttaggaaacagagaaaattcagaccagataaaccaagatactttaggtgactctagtccggtagaggattatgacaaggatcgagatgctcttaaggatactttatacagcattatctaccccttttttccacactaatatataattattcttaaattgcagaattttgtaagagctattaataaagctgaggggcttcactctggtggaggcttctctttttcaaggctccatcatgagtgacagaacagctacatattcttctggctcataatataataataataatattattattataataatattattattattgtcttattactcttatagtttcattctttattttattcttaggggggtcattgattgttatgaatcatgaacattgtttatttttctgagattgtatatatgaccctttttttttaatgtttacagcaactccttatgtgtattcagtgttatatatttatcgagtaactcagtgtaatgcatataagttggttctgggtgactaatctcaaaacttaaaaaacactcacaaattatgtactaaagatgtcttcggttgcaaaaattgatttcatatttttataagatatgagttcgatcaattcttatcagctgaattaatttttgtttgcataaatttaatttactctgtcttctattattctatgtgctttaatctcctaagctactcaattttatatatgttgtttaataataatgatattttatatcttatgtcccctttctttggcgtttctccactatgcagctggtcttttaattttatgtggtgttgatcttttaaataaaattattatagtataccaagtaattaaaattttagtaaaaatactaataatataaaaactattttgaaggggggttagtatattttgttcttgtttactatattttgattaattacaattatattttaactaagctaagataattaagataaattatattattaattttgggaaatattaaatatttaaaatgttactttatgaaagtttagggaatacttcgaaatttcaccatgaagctagcaatcttaattatggtgattaaaaaaacattaacaaactcgataaatagctaaattgactttgataaattgataattaaagatatattttcaatcgaaatatgttatcttgaaaaaataataccatgtaattgctttcaaaatattttccattatcattgtgatcctagtatcctctcttctctctcttcttctcgtttatcaagttatgctctttcatgttgtttccttccttagtagtaggctcatagcttatttctttttccatctttttagtttattttatttttctccaagggaagatgatgatgaattgatgatatcttattggaaaaaatagagaagatgagtaattcacattttgagttatgtgaaaatggtgataaaccacaggctgatgatgatgaagggacacatgagaaactagctaactacagcaacacaccagtgtgaattttgtggcaagaagtttagctctggcaaagcattacggggccacaaaagatttcaccttcaagctcaaaggaaagcattatgagattttatgcttttgtgtattttcttcattattgaattaagcaacaaaaaagtcttatatagagtttacatgagtagaaattttgctaacaaaataacaaacccaacaaacagatcctatattcttatatagagtttaaattctgctaacaaaataaaaaacccaactaacaaattctatatctataacataaagatattattgttataacagataacatatcctataacaataacaaccctaactaacgtaaagatatgattgttataataaatccattctataacagaatctatccgtattagaataataactctaatggcaatggcatcattcccatccaataagtccttctacggacatataagatcccattctgataggaattggaagggcattcaccctgctctatcttctctccccctgatcataagcatagttctcactctaactcatctattgaagagagcaaaggttgtttcaatgcagatgaagagacagctactgatctatcaaaacatttgcaaatgcaaccaagatggcatattaccaataacaaagatggggtacgcgttgatagtgaagaagatcgtgtagctgctcaacaagattaatactttattgatactgaagaagtagaagaattctgctatgctgttacctttttgttcaagagtgatgtgttgattcatagggtgtttaggcataggtttcatgtacaccaaagtgtttaaatgcatggatttcaagaacactagtcactagatagtagatacgatttaataattagattgatgatgttggagaatgtagattttgctaaaatccagtattagttatcattttgtgatataaaaaccaataatatttagcactattattactctatgaattaagacagatagtgatcaacattagctaatcttaccatcatattgtggatgtgaccaaagaggaataagatagattgacacaaaaacggatgatgtgtaaataatatacatgggtatgactttgaaactagtttctcacatgaaaattactcaaagtaaaaaaactgttcacactgtattcttcagcccctccaagataaaagtttctagctccaccaaaagatgagcatctttccccacctttctgatacgccttggtgcataagcttttctgttttgtttccattttgcttccaccacaagtaatgtcaccatttttttcttctaacttctgtttcggtatcgggtccctctccttcccatggttcatgctttctttttgttcttcatcctgccagttttggcttctttgtgttcgactttcgatgtgctttatactattgtctttttcttctatgctcggctgatcaggagttgagaacccttcttcaacatggaggctctttagggtttgtccttgttcctggttcatctgattatctcttccttgacctatcattttagatgctgagggtcaggaggagaaacatgcaataaaacaaagcatatgctaatgctaacccacatgtgaaatgcaaaaatgaaaacaattgaaaatattggagcagataaagatcacatggttatattatgactagatgttaaatctaaaagtattctagtacttactgttgggggaagtctcagtgctgaagaggtaaagatcatgttcagttgaagtatctggtagtggtatactatctgtgtatgtttcatgggtgctaccgggacgcgtttcttggtggaggtgtagtggttctcttaaacgtacaattttattgaaacgccttactcttaatataccacaagaaagcttttggaggaaatactcctcatcattcttcattttcctgtgaccacccagatgcatcttacattaatatgaggttgtagttagataattcactaaaaatgggttaggattttacactggaaatagttacattgtttgtcatcttatttcattgtttaagcaaaagaaaggtatatttgtagttacctgcatcctaaaataatttctagctcttaaatttgagaatgctgcactacatgtatgtatttatatagatttggtttcgaccagtgtataattttcaaattttttttgtaactatgttatttaataaactagtacaaatacccataactaaatgaaaacatcccaattcaacttcacctacgttgactaattcataagttatctatcattttgtctttcttctttttgttcaatgtatacttcaatttaagcagttgtattgcaaggcctaacttgctattgcttgagtgagtagcctgaatgattatctaggggtataactgagatttagattgatatataatagattttgactaaaacaaattatatgtcagaattatgttgtgatcttgctgtgagttagaaccagaatacttgaaattgtaaaaggtgatttatttataagtaatgcccaaatctaagagctcttttagtagaaaggtatgacttgcttagacattatgccccatagaccttagttaatggattttattagattatctgttttattttaacttgaatagtcttcaaatgaagggtttcaaaagaattatatcattcttgcatgcctagtaagtgtagaatttgacatgtttttgttagtccatccatgagactaagataattcagataatcaatttaatttcatttgacctagttgcctttagcatcatggctgatttcaatgcaaccgtcttcagtgatgatcctgcagccgtttctatcttaaatctaacctgagaatatgatgtgaaaagtttcataagatggaaaaacagcaggtctagttctcttaaaatgatttcttatcttgagcaaaacatgtgtggtagaactatagaggaataaataaaacaacagcttaaatcattgaatgatttcatcaattatttctgtttataaatgttaattgtacttttgagaaacaatgttacaaggagtactaattgtactttaaattttggagaagcaccgttccaaattattgtttctattcagtttaaatcattgaatgttaattgtactttggagaagcagatgtgtagatcattcaagacctatgtttagtgtatgtatgtttgatatactcttactttagaagattgtatttttgatctgcaataatttgaattggagaaatacttgtcggttcacagcctgcaactacaagttgtagaagagtgttgtctactattttctattagttcttttaagtcataaccataatactgtcaacaatggaaatgattttgttttcgtgctaggagtggatggattctttataatttggtaaatcttaaatatataaaactcattttgcctggtaggcaacacaagtagattttgtcactggtttttatcaaaacgtaaaattgtttacctagatgagtaatgagttgtattagttgcaataatgaaaataatagaaataggagatctgtttttgttcttctcctactcttattttgtatattgtttcactttgtcatctggttacactttatacaagttcacaagcaaaacaatgacttacgtttttgggaataatgtatactcattcctgtgggaaacttttgacaacaatatccacattttggaatcttgaatactttgatttaacagttggaagttagaatgtactaaaacaaatatcttttggatcactgcttactcaatacttcgtagaaacaactactttgtaccaaattgctgagtatgcttttgatattataaccccctccaaccacatagaaaatatcaccaatatatttggcacaccttttccgtatttttacatgattaagttgcattgagattttggagtagaaatagtatattcaccatatatgtaatagagtataataaggattaagcttactgccgcagagaaatttatcaggacatcttctagtatcatgtccaaagaagtcagctcacaagtaactctaatcacagaacatggtattgaagggaagaaaaaaagttaggtaagggatagaaatgccaacttataagttgaaattaggaaacaaatgttcttaaaacatttttctagtctaattatctcttttaaatatttagtagtcaatatgcaagtcatattttatgttttctaatggtcagataacaatgtaaagttcatggtgaaaacaaaatagagaaaatcatttttttataagctaaaatagagaaaatgttattaactagtatttatacgaccttttgtgatttgtatagtttaaaaatccgaccaatctccggattgttcagatactcttccttcttcctggcagcttgtgcctcaatcatcttctggctagctccaaacattaacctgctgtccacactgcttttgtaacccactacaacaaaatagatgtaaagggaaccaataattggattgattagtgaaattaatatcttcggaccaaagtttgcaatcaggttactcaacacaaatcttattgacatattcttcttttattttccattttctttcttcataaaatggttttgagaggatgaataaaataagtgtgtatttgatttctattttctaaactatttttagttttcaaaatacaactaaaaaagttgttcaaattagcatctggtagtaagtggtgcaaggcacaaaagagtgtagaattgatggagaagttgaacaagatgaaaatagaagaatatgagaaaacatcacttaagtagtttttggattttaagacacttgttttagaaacagttttcaacatttaatagatattggatgagaaactgattgttgagtagtgtagaattgttctagcaaacaaattttaaaaccaaaaagagagaagatgacttactgggagtaataacttggtgcatgactgcaatttgtgtgagcatatctcctggcacaaataacaagccatgtagagaccattcaaagattttaacattgattgctctagatgcatcatggatcacaaccacgctttgcccttccatgtcaatgacttcaatataccttattaaggaactccaactttttattacacaagtggttcaaggaaattgtgtaacaaaagtaagttctagcagcttattaaagtatgagtttcccaacgagactttgtgttgaagagtgtgtgtccaaagtgattttatcaatgagtaataatatcttaaggtaggatttcttgtgcttatcaagtatcctaagtaaccccttaaaaatggttattcgggattggtcttaatggttctgctttggcaaaatctaagctcattgctctatagctttcgatgagaacgaatgacttttcctggttaagtaacgaaattaccaagcattgccatgtagattaagtattttcatattattatttcattacttctatttgttctctttcaatcattttgtcatggagctgcgacatatggtacatgtgttttttttagaaagtagaacaaagttgtgatgacgtgtaggcataacgtataaaacaaatagcgatatgtgaagtgggaactcgtaataaaagagcaactgaaatttgaagtatgtggttgtactaatgtgcaagatttgattctacattgttttattgctaaggatgaatttggaacaaatttgatgctaaacaaacacacttaaaatcatagttagtaaaattggatcggatcggcctttggaccagttggaccgagaatcgatagcacaatcggtccggttactattggaccggttatgcagttgacccgatcaaaccctgtcaaaattgatccgtggaaccggtctggcccggtcggattttatttttttgggggggatttttttaattttttatttattattaccaatagttattttgaattttggagtatgaatgaacttttcttactcaaataatgttagttatatacttatatataatagataaattttgatatatattaggtcaaaccgattcaattactaaatttgaataacttagaaaaatattagttacattaaatctttcactattcacccaccacaacaagatatatcatcataggatagaagcatggaactataataaaaaaaattaaaaataatgttgaacaaaacactaaataaaataatgttaaacaatattacaacatactaaaaatgtattttaagtgaattttactttatttctagttaattgaacaaaacactttaaagtcttaaaaaatattaaaaaatatcaatagattattttttaggtggattaggtgagcaaatccgtttcatcaataggttattttccttcattcaagacccacaagaaatgctattatttatctctttttttgtattattttcatcttcatttttaaattagatttaatatttctttaaaaaaatatttctcatatagaattaaatatttaaaattattcatttatcataaattttgttatataaaaaatatatttatcatgtacatttcaaaagctaaaataatagttaattgcttaattataatcaagacactaagaaaattatgagaaaaaaataaaaacttaaagaatcaaaatgtatcaagtaatctacttatcttccttattttatgtcatattcacaataacaatcacaataaactcattataattattttataattgatataatatgctatttaggggaaaattaaactttaaaaatgatattactaaagtaaaaaaaaacaaaataaaataaactccataaatcactttagattttaaaacagaaatttgtttttcctaaagtgggtctggaacgtgaatttgagttcagaatagagaattgggactgatctagggtttgtgactgtacatgctataaatataaattattgagcaaagaaggagtgtctctctttttcactcactctgcactcactactactcagcactgccactcttcaatcacactaatggctgtcaccttctcagatctacacaccgaagagggcatcaaattcctcgatcaattcctttctgggaaaacctatatctctgggtaacactcataaaatcaacttaatttttatgtgaaaaaattgattttttactgtttctgacattcgctttattgaatttgtatatgggtttcgagtttagggatcaattgacaaaggatgatgtcaaagtgtatgcagctgttgtggaaaagccaggagaagactcttttcccaatgctgccaagtggtacgatgctgtctcttctcaacttgctccaaggtttgttcctctctcacttgttttcttttttcctgctgcaaattatagttttgtttttctttattagattttgcgaattttgatttttgttaatttcgatttttatttgagtagcttccctgggcacgctcaaggggttagattcagtggcactgctgctccaactgaagctgcacctgccaaatcggtatgctttttccttaattttatattttgttgttgccttatttttaaaatcgtttgttatattgaaaatgcatgtatatatcatttagtatttgtctttttttagtaatttagggcgctcgatagctagacttttaatttatattaaaatatgtgaaagttacatgggatttgttgttaatacttaatatgaaactaatagcaaaagccttatcttatcttaattagagtgactgtgtgggggtggttgattgccatgcatattgctattatgagggggatatgggaatgagtagctcagtagaaatgttatgtttattttcatacattaaaaaggttgataaatgtttagtatgtatcccattgtccggaaacttcacgctatacacaggtaagggggagggatattgtatgtagccttacccttgcatatgcaaaaagattgtttttggattcgaacccatgaccaacaagtcaccaagacacaactttaccgctgtaccagggctcgccctcattaaaaaggttgataagtgtatgctaaaaaaatttaagccattggattatgactgcaggaccttgcacttgcagttactgttctgactgcaggcaatttggttccagttagttcatataagagataggaattggagattgcctgcaatcagtgtgtgaaagtagaatctttactggctattttgtttttcaaacttcataaatgaaatataaattaaagaaacttgagctgcaggatcatgactgcagagttgactgcattaaaattgaatgtggagaatcttggtctaaaagaaatggaggatgctgacaaccattgtctctctctttctatatgtgtgtgtgtgatttttgatctggattttccgcatttaaattttatgcaatcagtcccagtcatgatcccacgcaatgttattagactagttcagggcacttgatcactgattgaaccaatgactggatgaactggtattaaaaaattataaaaaaaattcatagtatgccactatgccttaaaaattataaactgcatcacacctcttatttttatctttcaatattttgatcctgtaacatgctaaatttaaaactatcactctgacaaaaagagaaaacatgtttacataagtgaaaagttaaaaccttagatttgcagttgaaatagaagacaaagcaattagagtgttattttcttttcagaaaaatgcttccataatttactcatttagcatctgtttcttttataagatgtgaatttgaaatcaattaatccatttgggtgaacacctaactcgaagtactttgatagttttagaaagaacagagcttgattatgtaaccaactaaccatattcatatgtaacataacatgtttactatatagttcctgaacatgataagtattagccaagattacaacatcgaaggcacattttagagttgaatagcactataatttgcttttgacttcagatagttactcaagttttatatcccatgcagagtagtagtagttttgattgaattcatcatttttttttttggtcagcaagattgaattcatcatgatgtgattactaagtgaaattgttgttatctaagataataatattgaaatgaatggaagtacttgtattgtaaaattatataaattgacttttgactttatagtgtactgatatacttattgtgaagtgtaagatattattgtggttgtactgaagctgctaagtgaactaattcaactaatttgatcattgggatttgtttgaatttgtcaggctgccactgctgaagaagatgatgatgatcttgatctctttggtgatgagacagaggaggataagaaggcagcagaggaaagggaggctgctaagaagcctgccaagaaaaaagagagtacgatttctttaatgtctcctgactgtaaattgtaattcgtggtccatgaaacatttctcaattcccagaaatataatattgatagaagccataattgaatttgtctaatcctcctaaaattgcatagttatttggggaaagtaggaatgtcttgttatatggtagagtaataggttgaaatttatgatgactggtcagacactcacgtggactattttcttatcgctagatcttattttttttgttgaaagcctttgacactatgacttaattgacatttataggtggcaagtcttccgtccttcttgatgttaagccttgggacgatgagaccgacatgaagaagctggaagaggttgtccgcagtattgagatgcctggtttattgtggggagcatgtatgaaattttcttaaacttttctcttgcatatttggtgcatttaacttctttcaaaattatattttatctaaaatgtttgtttctattggtacagccaaactggttccggtgggatatggtatcaagaagttgcagatcatgatgactattgttgatgaccttgtatctgtggacactctcgttgaggaacgcttgacagttgagccatgcaacgagtatatccagagctgtgacattgttgcattcaacaaaatttaagttttcttgttgacttttgagtttggccattttcaagaggctgatcagtctactactctttcatcgttcatgtttggtctgtttcaatggtggttttgttggaaaaattgtgagaagtaaaaagatatatagatatattaagtatccatgttaagatgtaactttgaatattatttcttgaattagatttatgggattaagataactgaacgatgtgcttccatttaaattttgataaggttctcaaaacctgtcaatttcattgaatgtgcttcagggtgtatagaataaaaccagtttggtttttgacttattataataattatatcattttcttttcaagctatttattggtgcttaggggttctcgaaaccaaccaagaatatgccatcgtttgagtgcatgccttcaccaacgccaattttgctgaccttagcttcatcagcaccaccaaacaatcattattgccaccaccgcttacaacaatacccaaacaaattttgatttgattccaagaaatatcatacatattgttgtagtaaatactaataaattaagggatcatttgtgtatttcaccaaatacaatttccttcaaatttttttgtcatgttagcctcgattgttttgactatatttaatggaacgattgctttgcctgttaaaacccaattcagccaattagtttcaactttcaacattcacataacttctgcagttacaaaacactgatctttaccaaattctttgcgtgtcttctcattatcacctttgttttgtaaagttcatttgttcggatcggaactttatttgatttagtatttaataattggaattttgatgtttgaaaaggtgaaagatgatatcgaccctccataatttcagaaaatgaatggtacttgactaaattaccctttattgatgttcttattcagcaaaaaattattattattttgtcagcataaaaatatattatttaacttagtggatgtattactattaagagtcaaaaatattttttttaaaaacaatatgttcctttttaataacaataatttttcttctttacaatgactaattgtagaatagaaattaaattcagtaagaagctctactttcaaacaattgctcaacttcaaataagaaaatatcaaaatatagtattggttataattctttgcaagacattaaattgtcctaaagcactatcttacatttgggggcctgtgataactaaatataattgctctcatttgtttggaacaagaagttgcctcgactattaacaaaccacgaaaacttttattttcttgatgcatcaggattcagaacgaagtagcattacataatacatagtaagtaagggtgtattatgaaacataacactatttgatcataataaaaagaatatttttacctatcaattttttcattcaaatctataaaatattaaaaacaatttgtctactaacattagaatttagaaatgcacattgaaaaagtagttaagataaaaaaaatgctttaattgcgggtcaaacaaatgtccaaatcagaagtctttagtcacatttatttatgagtgacataaagttagttggaaaacttaaacaattgggactaatgcaattatagggcaccatcaccttgtcgtgctatataatatatacatatatccatggtccttcctatgctcgtggatccattcataattgatcttatcggtgacttatatcatctatgatctgtctctcgtacatggcaacacaaattttaaattaatttttaaatatttttaataaaaatagttaaatttaagtgaattgtcagtaaaatatatatttttaaagaaaagagtaaactctcgtttttaatcattaagattataaactaacgggagttcaatttaatggaacgtgctagtctcatataacctacagttaaggtttgatatcaaattgcgtctcaaataagaatatttttaaaagagaatatctaagagaaattatataaaaaattaagattaaagtgttnnnnnnnnnnnnnnnnnnnnnnnnnnnnnnnnnnnnnnnnnnnnnnnnnnnnnnnnnnnnnnnnnnnnnnnnnnnnnnnnnnnnnnnnnnnnnnnnnnnnnnnnnnnnnnnnnnnnnnnnnnnnnnnnnnnnnnnnnnnnnnnnnnnnnnnnttttactgttattttatattaaaaaactgaagaaaaacattaatttttaatgttaagaattagtaaagaaaaaaattgaaatgttaaagactaaaatatataaaaaggtaatttcaaaagacgattgtgtcaaaaaggaataaaggaaacgtgccttttagcatgtagcatgggcaaagtagctgttgatgatctaactcgatatattattggcaatagcaagtaatatctgtttgttttatattaaatacatagtttaaattcattttttatttctataatattttgtgagcgtgtaattttagttccaacacaaatttaattacacatttaatctttacgattttcaaaattgaataattgtaatctaccactaatctgcattcaaaattaaatgataaatattaatatgaccgtgataaataacacgtgtgattaacttatttacattaaaaaaataataatatggaaaataaaatataaaatttgctttaatatattttaaaaattatttctttcaaataattatattttcaattttcaaaatttataaaannnnnnnnnnnnnnnnnnnnnnnnnnnnnnnnnnnnnnnnnnnnnnnnnnnnnnnnnnnnnnnnnnnnnnnnnnnnnnnnnnnnnnnnnnnnnnnnnnnnnnnnnnnnnnnnnnnnnnnnnnnnnnnnnnnnnnnnnnnnnnnnnnnnnnnnnnnnnnnnnnnnnnnnnnnnnnnnnnnnnnnnnnnnnnnnnnnnnnnnnnnnnnnnnnnnnnnnnnnnnnnnnnnnnnnnnnnnnnnnnnnnnnnnnnnnnnnnnnnnnnnnnnnnnnnnnnnnnnnnnnnnnnnnnnnnnnnnnnnnnnnnnnnnnnnnnnnnnnnnnnnnnnnnnnnnnnnnnnnnnnnnnnnnnnnnnnnnnnnnnnnnnnnnnnnnnnnnnnnnnnnnnnnnnnnnnnnnnnnnnnnnnnnnnnnnnnnnnnnnnnnnnnnnnnnnnnnnnnnnnnnnnnnnnnnnnnnnnnnnnnnnnnnnnnnnnnnnnnnnnnnnnnnnnnnnnnnnnnnnnnnnnnnnnnnnnnnnnnnnnnnnnnnnnnnnnnnnnnnnnnnnnnnnnnnnnnnnnnnnnnnnnnnnnnnnnnnnnnnnnnnnnnnnnnnnnnnnnnnnnnnnnnnnnnnnnnnnnnnnnnnnnnnnnnnnnnnnnnnnnnnnnnnnnnnnnnnnnnnnnnnnnnnnnnnnnnnnnnnnnnnnnnnnnnnnnnnnnnnnnnnnnnnnnnnnnnnnnnnnnnnnnnnnnnnnnnnnnnnnnnnnnnnnnnnnnnnnnnnnnnnnnnnnnnnnnnnnnnnnnnnnnnnnnnnnnnnnnnnnnnnnnnnnnnnnnnnnnnnnnnnnnnnnnnnnnnnnnnnnnnnnnnnnnnnnnnnnnnnnnnnnnnnnnnnnnnnnnnnnnnnnnnnnnnnnnnnnnnnnnnnnnnnnnnnnnnnnnnnnnnnnnnnnnnnnnnnnnnnnnnnnnnnnnnnnnnnnnnnnnnnnnnnnnnnnnnnnnnnnnnnnnnnnnnnnnnnnnnnnnnnnnnnnnnnnnnnnnnnnnnnnnnnnnnnnnnnnnnnnnnnnnnnnnnnnnnnnnnnnnnnnnnnnnnnnnnnnnnnnnnnnnnnnnnnnnnnnnnnnnnnnnnnnnnnnnnnnnnnnagcttaatttggccattggagtatatgggtattgattgattgaaaccccatatgaaaataaattgtgctttattgacaagttctttgttttcttaattttcaattgggggttagttatgccttctctctactgttactgtctccgaggttatgattcatgataagttatctttgcatcttgcatgaattttgttattcctttattcacctttgataaaaaaaaaaattaatccttttaggaaaacttgatttcatttcaatttgtttattatgatgaatatacagagtatttccccctctattgttactgttggacctgttctttgctgtcctgatggccggatatatggctttttatctgagtaaattgttgtgttgggtaattttgcactgatttctagcatctggtttaatgggttcattcaattgatgatttgcactttgtgatctggttgtgaaattaagggtgcttgcaacacaatttctattggttaaagtttgttgaaattcacaggattattagtgaaagtcattacatggaaggtgagaccagcatcattttgtgagcccaataaatttcagttgattgtaaaaaaaatgtgtcaaaggatgggttgctatcatttccctcatcaaatttgttctagtgtttcataatttgatccaaagatgacactgtagcaacagcttctctgatcatggtagtcttgactcttgacttgtcctggtccaaatttaagcaataggatggtttaatgtgcttttatgtatatacatagccatcgctcacttttggtgagataacctgttcctgtgtgttactaagttggtggtggtttaggatatacatattgatactagcataaccaattggcatattgaatcttcatgtctttttgattaattaattcttttttagttctgattatgtgtgagtatatttgacaaaaaatgaaagttgaattttggtgcagattttacaaattaaattttgttaaaaagaaagatgtcaagtggagcaacacactggtgttatgcatgcagacagccaattgtgcttgatgggagagatcctgtttgcccttactgtgatggaggatttgtacaagaacttgatgagttgcgaggaattgcacccaaccataaccataccttttcgtcacagtcaggagactttcatcaaatgcctgacattttcgatgctatacatgcttttatggggcagagaggttctgaccagagattcgggcttatggatgccgttgataatttcatgaggcatagaatggccggaagaaactcaaactttgatgttagagggaggtctggttctgtcccagttcctgaacagagttggggtgtttttagttccggtccttatttaatatttcatggtcaagttcccggattcaccttggctgctggcaacccaagaggtggtcctaggcgtgttgattttggtgactactttatgggtcctggactggaagaacttattgagcaacttaccatgaatgatcagcatggtccagccccagctgcacgatcttcaattgatgcaatgcctactattaggataacacaggcgcatcttcgctcggattcacactgtccagtttgtaaagaaaaatttgaattgggcactgaagccagagagatgccatgcaaccacatttaccattctgactgtattgttccttggttggttcagcataactcatgtcctgtttgccgtgttgagctgccacctcaaggacaggctagttcccgtggtactcgaagttggggaggaaggaatgccagcaacagcagcagcagtggcagcaatgatatctccaggggcagagagaacagccatcagaaccatggaaggagaaatccattatcatttttgtggccattccgctcgtctaactctaacaataatcattattctgagactgggggaagcagctcttcaaccactcctgaccagaataatggaacaagttatagcggttggccctttgatcgctaaaagtatcctttcttctcctggataagtacaatttgctgtctaataatgcttgtaatttaaaatgccaaggaaagagtttattagtattgtattttaaacttgagctcatgtaaggaagatagaagtttcttaaaatctttgtacatgaaattgcctggtttgttgaatctctttgaaactttaatgccacacctgccattattcaatttgattgtatcttgctgcttatttggtttgtttggttcctttggggtcttggcagcaagcacaatatgctaaagactaaagagagtgaatttggtttgttagatgaatcttttagccagtgaatgtgaattgccagatcacagattaaggttgcttcctgagataactgcatcatcaagcttatggagtgcactcttgagaatggtgtcaagctaattctctttctgtttgttagcatggttctttcaaaactcattagtgaggtctagcaatggaaacctttaggaaatactttggtggagttgccaaaacaacttggcattttaataacttgggttgaattatggccaaaatactatgggaaatttgtaggaattttgccgtaacaatttaatgtatacatgtcaatgcatgtgttagtcattttggtttatctcaaacaaaagttgagaaaaagtaagattttacatattcaaagattgcacattgcatccattgacattattctgatgtatatccaaattaatcatagtcaaaaaatttatattagaatgcgtctcacaatggctatagtcataaatacacaagcacttatgttgtacgttttaaagtcctagtttgctaacccacccatcaacagcctaaataagaatttgctatcatcctttgtgtctaagttggcaggataaagagattcaaaaccctcgatagctgatagtttcaaagcataaattaatggaaaaattagtgtaaattgatacaattatctattttgaaaatgtaaatatgtagtttcatcttaagacatcttattgctgtgagaacttcgacttacacgatgtaatatgtattggaattttattttagtaatgaaacacggagatagtcactggattgagtctatatatggaacactaggaatgtagcctagagtcctagactcagatgaatgtgtggtttcttgcgtccaaataatcatagataaatgataacgatccacaagaaaacatatcacatagtgagggccaacttggcaacttctaatgattcatatttatttatttatttatttttatttttaacttactttatttgactttttcttttagataaaagttaaaattattgtagttaactttctttatacatcatatatcaaattttaaattttaaaataaaataaagtaataagaatccaaaagtatttaattgacgttacaaaacttaaacttgagaaaattatcttttatgaaaaaaataaaataaagaaaagcaaaaagagagaagatcattcatttcttgtttttagtttacataacaataacatgatggattgtgatttttatttgtgttaataacaataaaaattaattttgaaaaaatcaaatataattaacaaaaaaaatattcaacataaatataagttaacaaaagatattttgggtaattaaggttatagtcaactaaaagaaaatgtagataaatagatgagtgttcaagcttatttccaaatcatatgaagtgtcactatgagctagtaaacatacaagttgaactattgaaacattacattattttcaaaatttaacttatttatctgaagattttttatttttttaaataaaataatttttctcaagtttattttttgtaaatatactcatttggagagtatgaataattatctttctaaacgaaattaaagtgttaataaccccgtatctttgtcatgatcgtgcttttgtgattttgtcatgtacacagaaaaacaaaaggtgggaccctgttggcatgcatgcattaattaccatgcctaggagtcacaagcaacataattctctggcaccaaaggtttgtatatctgtcacaaaaaatacaaacaacatgaagggtcgcatatcaagaggtactacatacatacatatatatatatatatatatatatattctttttctttttctgatcattgttctttcgtactgtttaaacaattaaaataataaaatatttattgtgaaagttataaaaattattacaaataatataatcttatatatttcaataaaaaaaatgctttttttagttatttagtcagtgttgtaagaatattgattgatatttgtctttttttttatatatcaatggttatttttgcattgaaaaatattttttggacaatcttaagttatctataacttgagagagagataaatgattaatttaattgatgatatattataataaaaaaagaaagnnnnnnnnnnnnnnnnnnnnnnnnnnnnnnnnnnnnnnnnnnnnnnnnnnnnnnnnnnnnnnnnnnnnnnnnnnnnnnnnnnnnnnnnnnnnnnnnnnnnnnnnnnnnnnnnnnnnnnnnnnnnnnnnnnnnnnnnnnnnnnnnnnnnnnnnnnnnnnnnnnnnnnnnnnnnnnnnnnnnnnnnnnnnnnnnnnnnnnnnnnnnnnnnnnnnnnnnnnnnnnnnnnnnnnnnnnnnnnnnnnnnnnnnnnnnnnnnnnnnnnnnnnnnnnnnnnnnnnnnnnnnnnnnnnntgataaattttccacacactgcgcaatacgcatgttaacaagttggatcgctactaattgagttttaaaatcactggctatttttaaattttcctattgacatttaggaaagaaggttggactttgagatgacaagagaaataattactcttcgatccacgttttcttcatttattttcatgttaatttcaaatgaattcacaaaagattattttcatgttataaattagaatatataatttgaatatgcccttttaatattctctcttccttagatgtgttttcacacattattttctgcaactagctaaccattcgataaagtagatattctcatatcactggttaattgtgtcaatgtcaaccgttagatttggctactctcatatattgctatacaatgaagctggggcagacttaacagaggaaggacatgcaggatccaatcaaaccacactactttttatcatatgagattattgggatatttgtagtgggctatggaaaattattggaggcaaaatggacacttcacatgctctactctacacaacccttgtattcttttataataaggaaattagagagggaaaaaaaagttaaaggattcacctagcaaacaaaattgagccaactgtgatgctgccaacttggtctaaactttatgagtagttatcattggaagccaacacctagctagccgcaagtgcataaagaaaaaccaagatattttgtcacattaatttgtgtctttatttattgttgttattcttcttcattttgagttgtgattgtgtgtttgatctctaatcaatttggcagctcaggctcactaccacaagttattgcatccatattggggtggaatttcagaccaaaatccaaatgattttgatagtgaaacgatccaaagaatggaactaaaagtagcaagggagtgacggtaagattttaatcccacttgttgatgcttacaagataaggtaaaagtgaatgattcaatgaacgtagtttgaaggtctaaaggaacaaaatggaataacatgtacacgacctttgtctccaaagtttcccctttgcataataaaatatactaaggtctgtttgcataagtttcttcataaaaatgaaataagtgtatctcaagcaagctaaaacaagcatatgtataagataaaatcaacatttttagagaatttaaatgattctaaataagttgattctaacttatacataaattaattttatcttatgaaaaagtttattttatttttattatttttttcttctactaaatttatctaaataaagccttaaattcaataataactgagaacagaaacataaaatgtggaaaaaaaatagccgtatgactttttcaaaggtgatgcaatctctcaattaattcagaaggaactaggcttcttgaacatccaagcagtagtaaaaggttatcctccctcctggaactaattaattgaggtggcttcaccaatgaagatgaatttgagttcctatcagaccaggacattgaagcagaaacaacttcaaaaagttacaacactgtcaatgacaaaaacttgctatgtcaaaacttaaaactacttttcaagaaacaactatgacttgcctatgtttgttgtattaaagattaacataacatgatcatgaaaaaaatgagcaatcaacacatgcaaacatgcaaggctatgcatattagctatacctccatacgttcagcaaagtccagggccttcaaaattatttctgggaccaacaatgagagtataagtggtgaagtcagcgtgtatagcagaggcctattgggagatcaagcactgaaaatcaacattatgaaacaataaagaagtagaagacttggatttcatttcataattaaaatttacaaagaagtagaatcgtgccaattcctagcatttcaactgtgcaatatacttgtttggtgaagctgaatacaaaaaggtacaactcacagtaaatcataagttgattgtatcaaatttcagtattatcttttaatcgaaagataagaaagaaaatgaaaaatctaataaaggacatgtcttagtatttccatgaagagtgatctgtgataaacattgttgaaatctagtaactaacatgatactcatatatttaatgttgtaatacacaaaatggtttccataaacaggttcatattataccatataagattgcaatatatatctagttatttacatgcatgtcacaaatgaaacaactttacaagagccagctaacccagttggaaggaagcaaaaaccatttaaaagttattcaaagtgacagtacccatgttaaattaaaaaaattaacatatgctcccgtgggaacacacacatgcagatcaggcagaaacacaaaacattggtagtagaagaaaaaaaatataaagagcaaaaaatggcgcaacttggtgcctgcaaccagtattaacagaaggaaaaaaagaatatactgacagatgatgataattataaacggacagacactaaaatgaataaaaaattataagaaccaaaataaaaaataaaattttagaaactaaaaagtatatatatttaaatattatattgataagctacaagtttataagttaaatattctaattccaataagataaaattcctaaataacaaaacaatatcaaaccaaattttcctcacaaaattaaaatgtgcacggattaagatagtggttagacatcctgtgtttgacaagttgtggaaataatatatcaatatcgtccacacactcgtattgtacagaagaacattgtgtatcatattcatggttatggtctctcttcttgctcgtaatgcattaaaaaattaaatgaccattgaaaaggtttaagtggatccatttcgattaaaaaaactatttgagtggggtcagtagaatttggacagtgggagaaatgggatttcgtcacaagtaaaaaccatgcttgcgttaaaagtctgttcaaactgcatgtaattcgtgccgacgcaatttcgtccattaaccacgatgtataattggataaccgaagcacttaaccaattgtcaacgatgatattcactgcatttaattcaaccttccttgggtgactcatcaatttttactgagttgacatgatttaatttttttaatctcaaattaaaaataaaattatttctaaaatatcattattcattaaattttgttatcataaataaataaaaatcattaagaaattaaaatcaaatgaaagatatttttaaataataatattaaataagataaaattaattaaatttatttatatttaaattcaacatacaagtttaatttttttatatatgaatccaaagtgagcaataacttgaactagatcccttaacacgggtttatttaaacttggttagcttaaatcggtatccacttcagaaattaattacccattccttattcctacactttatttattattcaacgcaagttgttcattaacgcgttaaacccataagttctactaatataaacataaatttgcggcatattttgtgttttgtgtgatgagtggcgggttagaacttagaatgtataatttgcatgttccacccactgaaagcttaccaccaacaatcaactgtagaatcataagaaccaacatcaaatcaaacatattctgatgtctttcattttattcattcaactttctcccctcattttacagagaaggagaagaaacaaactgtctcggtaaactaaaaagatcattcccttcaaaaggagaattccaccccatggaaccagcagcagatgtctcagcagaagctactccaccatcttgcaatccaggcatgggagcattcatgctcccatttgagggcactggtctcattgatgattgagcaacaactcctgaagcatttgagtcatacatctgagcactactgctccttgaaaacggtgaaaatcctagccataaaccgttggaccttggtgaagctaaacttctgtccaaggaccagtctatgttggtataatcaaactgcatggtcccaccagtgctccagtctactggagaagaagcccctgatgggcctgctgatcctagaccggaaaagagtcctagagaagtagcagcagcaagcggtggaattgcacctgttctattccaaatgctattcccttggtgatctactgaattgctgctgccaccaacaaactgttgttgttgaggttgatactgaagttggtggtacatttgattggaattgagatagtttggactgaggcttctagtgctaggagcatgagatatgaagtcattattagatctgacagcatctgaactgttagatggataccaactagcagcaatttcaggaggtgatgagctcatgcttgtggctggaacttgctttgcatttacagtctggggccgctgcatcatgattaatggttccctggctactccatgttgaaggttcttaaaatcacctccagcaggcatatattgtgcttcggacttagcaggtgggggtgacatttgcaacggtgatgccagtgaataagaaacggaaggattagatcctgcacttggccaccttttatcagctggtacagtagcctgttggggctttgcccattcagacttaggttggattctctttagaggttgcatatttctattactagaatctgaagatactccaatcgtcaatgcagcctttgtatagttaaaatccttgtcatcttttttgggttgatttggtaaaggaacaggttttgtttgtggcattgagctctgacttgcaactcttgactgcttaacattgttaataataggaggatcgccggtttcctctggttttggtggagcagatggtggatcaagtttcaagtctctcaaggtctttgcagccctatcaagatcaccctcacagttaacaatcgctctttcgacctcctgttttgagcaatcatacctggttaccatatctgcaatccgagcaagctcacctgatatgtcaattttcaaattgcccctatttatgtttgtatccttcttaacgtctgcatcttcaccaccttcaaacaaccacgctactgattcctccaccctaccttcatttaatattagtgccattgttgccctttcatgagaaaatcccattgccacaagctgttgagaaagtgcctcaagtttccttgacataagataaccagtacacctctcatgcaactcctgtgctcgcctttccttctgccgttgatgttttctctcattcttctggcggattttctctcgcttgtcattatcagctcctggtactgattccggtcgaacagaaacattagaacttttctccttatgttcttcggactcaccagaccaactaccattgttagaaacagaatcatactcaacaccagcaaccactgagctgacaggatgttcatctgtctcatctatgttctgaaaacgaccattcgaatgtattggtgaggtaggtgttggtgacatgtccagagtatggaatgttcctaataaggggttatatgcactggctggcacaccagctgctgcattaccagatcctgtaggctttgcagaagccttctgagcttccttgcaaggcttcctgtctttagacttggatcgggatgcaggagacatccttaagagtcaatggccctgtaacattaaaagaaaacaagttatagtacattgcattttaattaccaaatcaagacaggattacatgcatcacaaacctattgaccaaataatattctgttcaatcgccaccccccctcccccccacacacacacaaaaaaaaaaaaaaaaaaaaaaannnnnnnnnnnnnnnnnnnnnnnnnnnnnnnnnnnnnnnnnnnnnnnnnnnggacaaatgaacaaaggcaaaaagaaagtgaacaagccaaaaaacaagtacatgttaaaataattaaacagaaaccaaacagtttatcttccccctataaagaagttttaataaaaatcattgaggaatataggaagaggggaaggatttcatgtccatacactttaatacattttaaaaagagaatttaatcacagaggaacttttttaccaatgatgtctaaacttcatttatatgtgcggaaccagaaatttatataattaaacaaccaatctgacagcaaaaagcaagatccctctcggaatggcacagtatcaaaattgaaaatatttcagttgaatttaccagaagaatgcacaacacttattaaaaagacaattgagagtgaaagtatcatacagtccagtatcacctttcacagaggttcagcgattcaatggcgccgatattttcaaacaatcaaccgtaagacaaaaataaaacaccattccatgttctccaatcctccaccattccacttatacattaatcaacacagtaaataaaaggaaaaaaaaaaaaaaggaagttgattttcatattcctcaaaggccgtgacatgattgatgactcccccaaattttcacacgatcaccccacccctaacaaaaatccaaattcttgtgaaccaaccatgaccccacaatcccccataaaactgatatgtgatatgtctatccaaacatccaaaaaattccactttctggcaaaaaaaatattccccaatggccactcaacacaaaaaatctataatcacacacatcctattcaaaattatatatatatatatatatatatatatatatataaacgcaatcaaggtcaaaattacaaggatcagcacactattccctctagaggatccgtgatatgcatgcttccccaatccaaagagacccgaaatccccaaataccacaaaaggcaaaaatgcggaattcgaattaccgaattccgcgattgcacaaaacgcgaaaccaaacacgcagtttcttagtccccaacacaacaacaaagaggcgtattaccgaattccgcgagagaggatcatagctgcggtttgagattgaaagaaagagagagaaaaatcgaaaaatgggaacacgaagaagaaccaacctggggtttcggaaatgggagcgttgatgacgatgatggcgacggaaggatcgctgttgaatgccgaaatcgttggagagagagagagagagagagagagagagagagagaaagagagataggtttttcgaggctcaaactgagtttggcagaattagggttttgaagaaacagagatcttataaaagataaaaacaacgacattaatttttataaaaaaaatcaacttatagagtaaaatagttaattttaattgttcatataagaaaattaatcaatctataaatgtttttaagaattttttattaaaaatataaaactttttttttaataaagaaaacctgtatccaaatagactttattattagtagtatttatatattgacttttaaggaaactaaactaagagctatgtgcaaatttaccgaattcaaaagtttcaaactgagccaatttgcaataaaaaaacaggagcaactttttcctattcaaaattattttgccttagactacacatataagattctattattgtatatatattggatatacgcaaaaacaaaattagaggcataagaagtaaaaaaagnnnnnnnnnnnnnnnnnnnnnnnnnnnnnnnnnnnnnnnnnnnnnnnnnnnnnnnnnnnnnnnnnnnnnnnnnnnnnnnnnnnnnnnnnnnnnnnnnnnnnnnnnnnnnnnnnnnnnnnnnnnnnnnnnnnnnnnnnnnnnnnnnnnnnnnnnnnnnnnnnnnnnnnnnnnnnnnnnnnnnnnnnnnnnnnnnnnnnnnnnnnnnnnnnnnnnnnnnnnnnnnnnnnnnnnnnnnnnnnnnnnnnnnnnnnnnnnnnnnnnnnnnnnnnnnnnnnnnnnnnnnnnnnnnnnnnnnnnnnnnnnnnnnnnnnnnnnnnnnnnnnnnnnnnnnnnnnnnnnnnnnnnnnnnnnnnnnnnnnnnnnnnnnnnnnnnnnnnnnnnnnnnnnnnnnnnnnnnnnnnnnnnnnnnnnnnnnnnnnnnnnnnnnnnnnnnnnnnnnnnnnnnnnnnnnnnnnnnnnnnnnnnnnnnnnnnnnnnnnnnnnnnnnnnnnnnnnnnnnnnnnnnnnnnnnnnnnnnnnnnnnnnnnnnnnnnnnnnnnnnnnnnnnnnnnnnnnnnnnnnnnnnnnnnnnnnnnnnnnnnnnnnnnnnnnnnnnnnnnnnnnnnnnnnnnnnnnnnnnnnnnnnnnnnnnnnnnnnnnnnnnnnnnnnnnnnnnnnnnnnnnnnnnnnnnnnnnnnnnnnnnnnnnnnnnnnnnnnnnnnnnnnnnnnnnnnnnnnnnnnnnnnnnnnnnnnnnnnnnnnnnnnnnnnnnnnnnnnnnnnnnnnnnnnnnnnnnnnnnnnnnnnnnnnnnnnnnnnnnnnnnnnnnnnnnnnnnnnnnnnnnnnnnnnnnnnnnnnnnnnnnnnnnnnnnnnnnnnnnnnnnnnnnnnnnnnnnnnnnnnnnnnnnnnnnnnnnnnnnnnnnnnnnnnnnnnnnnnnnnnnnnnnnnnnnnnnnnnnnnnnnnnnnnnnnnnnnnnnnnnnnnnnnnnnnnnnnnnnnnnnnnnnnnnnnnnnnnnnnnnnnnnnnnnnnnnnnnnnnnnnnnnnnnnnnnnnnnnnnnnnnnnnnnnnnnnnnnnnnnnnnnnnnnnnnnnnnnnnnnnnnnnnnnnnnnnnnnnnnnnnnnnnnnnnnnnnnnnnnnnnnnnnnnnnnnnnnnnnnnnnnnnnnnnnnnnnnnnnnnnnnnnnnnnnnnnnnnnnnnnnnnnnnnnnnnnnnnnnnnnnnnnnnnnnnnnnnnnnnnnnnnnnnnnnnnnnnnnnnnnnnnnnnnnnnnnnnnnnnnnnnnnnnnnnnnnnnnnnnnnnnnnnnnnnnnnnnnnnnnnnnnnnnnnnnnnnnnnnnnnnnnnnnnnnnnnnnnnnnnnnnnnnnnnnnnnnnnnnnnnnnnnnnnnnnnnnnnnnnnnnnnnnnnnnnnnnnnnnnnnnnnnnnnnnnnnnnnnnnnnnnnnnnnnnnnnnnnnnnnnnnnnnnnnnnnnnnnnnnnnnnnnnnnnnnnnnnnnnnnnnnnnnnnnnnnnnnnnnnnnnnnnnnnnnnnnnnnnnnnnnnnnnnnnnnnnnnnnnnnnnnnnnnnnnnnnnnnnnnnnnnnnnnnnnnnnnnnnnnnnnnnnnnnnnnnnnnnnnnnnnnnnnnnnnnnnnnnnnnnnnnnnnnnnnnnnnnnnnnnnnnnnnnnnnnnnnnnnnnnnnnnnnnnnnnnnnnnnnnnnnnnnnnnnnnnnnnnnnnnnnnnnnnnnnnnnnnnnnnnnnnnnnnnnnnnnnnnnnnnnnnnnnnnnnnnnnnnnnnnnnnnnnnnnnnnnnnnnnnnnnnnnnnnnnnnnnnnnnnnnnnnnnnnnnnnnnntttcttatgctatttttttgcagtgagattaagggggaagatcaaacaataatagattgtaatgtattctgaatatgcttaggaaggtaaagagaaaataattaaatttattaatcacgtaatataaaatcaaattaatatttttcaaattttataagaatccaaaatatattttgtctttcttttttaatttttgtatttgatattgttattttaaaaaataaaattataattataataaaaaacacataataattaataagttaatctataaatttaagtactcattaattacacatagtaatttataaagtatatatcatgactcactttttaataaataatactgactaatttataatgtcaaactaattaacacaatttattaaataaataaaaattaaaactaaaatagaaagtgttcaaaattttcattcttattataccaaagataactaagaaaaagataaatatataaaaatatagtaaataatatcttgtcctaattggtttatgtttgtattttggttaactcatgaaataaacagtattggaaaaaaatttatcttatgtatgattttgattcagagcaagatgaagatgagactattttgtattaatatcatgtttaaaaaaatttgtgataaaaaataaaaatattattataatatgactgtagatttgtagtatgaatgaatgaaataatgaataataactcatcatctatatttacgaggaaggaagaaattcggttttggctttggtgtaagttggacttggaggctcctaagtgagcgctttcgtgataggggaagacacgcacttcaaactcacgacaaaataaaaattaaaactttcccactttgtgcttcgtcttcttcaacgttaatcttgttttcttcccctttataaaaaccaaagtggggtttcgccttcttctccaaccgttttcttttttttttttttnnnnnnnnnnnnnnnnnnnnnnnnnnnnnnnnnnnnnnnnnnnnnnnnnnnnnnnnnnnnnnnnnnnnnnnnnnnnnnnnnnnnnnnnnnnnnnnnnnnnnnnnnnnnnnnnnnnnnnnnnnnnnnnnnnnnnnnnnnnnnnnnnnnnnnnnnnnnnnnnnnnnnnnnnnnnnnnnnnnnnnnncaacatgaggaagaagctagatactcgtttccctgcggtaaagtttctctttccctttgcttttgttttcttttttcatgtagaaaatattgttccttgttgttttgcattctattcattgtgagttgtttatgtttgctattttttttgtgtcattgggtttgttgttttttgttttccttgcgtaaattgatgtttctgactaacatgggagatgggtttctcttggttttggaatctctgatagttatgtttgtgcaaacgtgctttgtattaacatgtgaggctttggaattgttgttgcgttaaatttttttgccatgaattgttgactttgttaatgaattagatgttaaagttaatgtttttctggtcaatattgttataggcccataggatgttgttaatttggatgaaataagttttctttctgaaagagaaagaaggatggggagcctgctgttgaattttaatgtagtgcaacatactttaatcagaaaggaaacaaatgttttgaagttgtgattggcgcatatcttaaatctttttttattatgtgtatgtcttaacttggagattttgttggtataatttcatttttcgtttttatgtctacgtagtatggaaatagtagttgtcttgtaaagcatccgcatgctttggtttggctgtggaatatcaattaccaattttggaatgtaaaaccttataggtggtttggcattgctttaggtcaggctttgtgtattgtaagctaggacagcatgttgtgtgtagtactgtggtatggtgtgatatattccccttctaactttttctaaatttggtattttgtatcttttttaaaaattccctgaatttggtccctctcaaacaatggtatttttgcggtgtaggttggccactacctgtcctgtagatgtattttagaaatgatactttagatagatgaggacgaaccctgacataacagtaaagttgagctttggtgactttgttggtcatgagttcaaatctggaaaagcctcttttcatatgcaagggtaagattgcgtacaatatccttcccccatatcttcgcatagcaaagagcctctgggaaaatggagtacgtgatttttttttatactttagatagatgtaaagttgagcaaatttatttgtaagccatttggtttgcaaaattacttccaattctggattttattctttgaccttctgagaagggattgtttattcctttgttaaaactactgcttccaagtatttccatactataatcctggaggatagcatatcacacgtgctcaaacagaataatacaacaacaaaaactcttttcccactaggtgggctggaatatatggaccaaacaatgccaccatgtcctattataaatcatgtccataggttaatcatttaaatacaaatatagtttttgttggtctctctctatctctaactatgggactacccatcatctgttgtactttattcagattctatagtttttctccacacatacctaagccttgttcatgtgggaaatagacacaagggtcttctgtcgcacaccttgtattcttacacttttgaccccattgtacatgtatttgattgcttgaatatagacaatatacctttctgtctccacagccttgcacaatacacgcatatcttttatacttttatttttaggaggagagtgagtagtggaatttgagcatagattacatctggtggagtaggacaaacactcagttttttcctttaacttttagttgaaaatttatttctttcttcatttattgccgtggaatttccttaattgcatcaaattagaatcctcttctgccaacatgatttagttttagacattttaagtaatgattgagtaatcttattgaattgattattggcaggctaggattaagaaaattatgcaagctgacgaggatgtagggaagattgcaatggcagtgcctcttctagtttgtaagtagcttttctctttcatgcatattcttgggtgttttcttcttctcttgaaaagtgatttttttatatttttttattgtgctcttgggagtttctatgaattatttctgatttatgattatttatgtttatgtattgcagctaaagcactagagctgtttctgcaagatttgtgtgatcgaacatatgagataactttgaggagggggcaaagactatgaatgcttttcatttgtaagtgaagtttctattattttcttggttcaaatttgtgtctatgtcaagtctgttcaaggtggtcacaaggctgcaggtttctttcttttggagggcggttattactatgtacttataagaacatcagatctgcaattctaatgataatgtgctcggtgtcaaacaatttccctcttgttccttctatttatcacatgcacaaacatgattagacatgtaaatgacatctgcagaagcaaatgttgggatggtcggtcttgcttttggaacatgtgctgtttgttctagtatttaccttcactttccagtttctaaaatgtctgagttacttgcatccttgcctttgcagaaaacagtgtgtgcagacttttaatgtctttgattttctgaaatttattgtcagcaaggttcctgatttaggctgttctgttgcaactgatgatgaccatgctgtcactaagaggaggtttgtgctctagttaatactcttgttacttggaacaagttttctgtatgctgaactttgtttactttatattaggaaagttgccggagatgatgataatgacagcgacgaggagctcaagagaaaaaagaaggtaatttatcaactgtattcaattacttcatcagtggttagcttaaatttttcttgtgtgattaaaccttttgctgagtaattatctcttgtccatgcacactgggaaccttttgctggatacaaaaaaatttacttcagtcaatagggaaactcactagtggcttgtgaatgcaagtacgtctaaatgtctaatagtctgtgaggctaggccccacttcaacttaaagcttactacacataggaccaaaactgtctggttttctgaaaacttttgctgaaaactatagaattggcactaaagaacctggcagctgtttaatattaaatattatctgaattatggaactttgtttttttttttttttttttttcatgatttgcacagccagagccgggtaggggcagagctaggggttgtggccgtggaattagaaatgtagatcaaaagatgagttcacatgctaagtgtgaagatgattctgatgcattgaagcagaatgacactcaaagcaatgaaagcatggaaaatgtgccggaacctgaagaagttaagcagagttttccagtaagcaaaccggctgaagtgtccattcgaaattttgacttaaatttggacccagatgaggatatggattcattagacacaccaacttctgttccaactagttcatctgcaaaatcagtgtcagaagagaagcctgaggaataccctggaaggtccttgtctgaaatggaaaaaatgaccattgatcccattcaactagccaacataaatggaaggattgatgaagatgaagaggattatgatgaaatgtagatgaacctgtgttggtttattcattacttctcatacaggcccgtcattagaatgttcttatgtggaattagagtagattttataggagcagtagatagatacttactccttagtagtttaggaagattaggagggatagggtattgaatactctccttataacttatgttttaggttaaaagtggagatatagattgttccaattagaaatagccatttgccagtatagttatgacttatgagaaattttaatctcatgtaggcattgcttatggtaggcactacatttataattatttccattatttttctaacatgatattattattttttattatagaatatacttatttgatttttaatatataagcaccactaattgctgctctttaaaactaatctcgcctcaaactagtttgtttaaatttaaaataagtaatcttaaaataaatattttttaaataagcacttatttaataaacaaataatgttgatcaaaataagtagaaagctgttttttaagcataaacacaatttagacaactacactaaaaaatagaaaattatttattttatcaaaataaatatttttttcaccaaataaatttaagcatacttatcaaagaacatcacttgagttacaagcgggagttgggccaattagtacacgtcactatgtcagacaattataaagaattatttgtataattaactacccaatgtgggacttgcattgcctaccatgaggtgaacatgaggtgaacgttatctaaggtggaacataaagaatgttctaatggttttgaatctacttggaatactaataagaaagacgtgaaactaaaattccaaagtacagttaacttgatcctagctctagatccacatgcctccgtccctgattgaagatatctgaagtttatatttaatatcgataagttctaggaaacacagaatagttgggattcaatctcagacattggaataactataatttcttattaaaatgtcgatctaaatggttcttaacataataacagtggttgtgacatatacttgctcccttcaccaaccacagggaaagaagctgcaaagctttggcgtaagatatgcagttttcggaaaaggcattacagtctcaaattaacttgagcccatagttttttaaacaattccagacccgctcgagcaccttcattgctgtggtcctctttcatgtctagcaacaagcatagtcgttgaatatccttataaaccattttgtgaagcagattctgagaggacaaaatttgcaccattttgttgtggccatataaaacagccaagcgaactggaagcatcccatcttagtttggtatcagcctagaacgattggatctgaaaattctaatgataatgtgctcagtctcattaaatttccctcttttgtcttctatttttcacatgcacaaacatgattatacgtgtaaatgacatctacagaagaaaattaaatgttgggatggtcttgcttttggaacatatgttgtttgttctggtgtttaccttcactttcagtttctaaaatgtctgtgttacttgcatccttgcctttgcagaaaacagtgagggcagacttttaatgtcttcgattttctaaaagatattgtcagcagggtttctgatttaggtggttctgttgcaactcgtgatgaccatactgtttctaggaggtttgtgctatgattagtactcatgttacttggaacatgttttctgttggtgaattttgtttattttatattaggaaagatgatgataatgacagccacgaggagcccaagagaaataacaaggtaatatgtcaattacttctcagtagttagcttaaatttttcttgtgtgattaaaccttctgctgagtaattatctcttgtctatgcagactgtgaatctttcgctggttaccaaagaatttacttcagtcattagggaaattcacaagttgcttcactgacttgcgaatacagttgggaatgttctttatacaaaagttattaggcttaaatgtatagtaaggggttcaagagacttaggtttagatttcttaatctcctatataataatcatatttgctctagaaaaatatacgagttgtcagcatctacctgaataacatttatcattcgtagtttattgaggaggtgagagaggacttaccaaagacaaagcaagaataatcttataacattcatatgtactatgtcctatacgttttctcttattctatggaatccttcaaattcaagtacatttaatagtctgtaaaccttattatacaaagaaccaaaactatctgattttcttaaaacttttggtgaaaactgtggttgtaattgagcaaactatgcactatagaatcagcactagcacataatgtggaaattctagctgagagatgcaacattctaaagaacctcgcagcagcttgatgttaaatattatctgaataatgaaatgttttttttttttttttttttnnnnnnnnnnnnnnnnnnnnnnnnnnnnnnnnnnnnnnnnnnnnnnnnnnnnnnnnnnnnnnnnnnnnnnnnnnnnnnnnnnnnnnnnnnnnnnnnnnnnnnnnnnnnnnnnnnnnnnnnnnnnnnnnnnnnnnnnnnnnnnnnnnnnnnnnnnnnnnnnnnnnnnnnnnnnnnnnnnnnnnnnnnnnnnnnnnnnnnnnnnnnnnnnnnnnnnnnnnnnnnnnnnnnnnnnnnnnnnnnnnnnnnnnnnnnnnnnnnnnnnnnnnnnnnnnnnnnnnnnnnnnnnnnnnnnnnnnnnnnnnnnnnnnnnnnnnnnnnnnnnnnnnnnnnnnnnnnnnnnnnnnnnnnnnnnnnnnnnnnnnnnnnnnnnnnnnnnnnnnnnnnnnnnnnnnnnnnnnnnnnnnnnnnnnnnnnnnnnnnnnnnnnnnnnnnnnnnnnnnnnnnnnnnnnnnnnnnnnnnnnnnnnnnnnnnnnnnnnnnnnnnnnnnnnnnnnngaagaggattatgataagaaatgtagatgaacctgttttggtttataaagttctaattgagaattagagtagtagtattagacaaatccttagtcgttaggaagattaggagggacaggacattgaaaactttagtccttacaaactttgttttaggataaagtggagatattgattgttccaattagaaatagccacggtattgttatttgagaaattttaatataggttatagtaggcactacattcagatccttaaacttagggattttgattttgttttagctttgattgtggcnnnnnnnnnnttttttttcatgatttacacagagcctgaacgttgcagtggcagcggaaggaggtatcaatgtcagaagagaagcatgaggaataccctgaatggtccttgtctgatatggaaaaaatgaagattgatcccattcaactagctaattaacttaaatggaaggattgatgaagatgaagatgaagaggattatgataagaaatgtagatgaacctgttttggtttataaagttctaattgagaattagagtagtagtattagacaaatccttagtcgttaggaagattaggagggacaggacattgaannnnnnnnnnnnnnnnnnnnnnnnnnnnnnnnnnnnnnnnnnnnnnnnnnnnnnnnnnnnnnnnnnnnnnnnnnnnnnnttgattgttccaattagaaatagccacggtattgttatttgagaaattttaatataggttatagtaggcactacattcagatccttaaacttagggattttgattttgttttagctttgattgtggcattgtgttgtgtatgtaagtctgttattgtatcacataacgtgtcctctctagtacaatttgagagcaaatctgaggatcaaacccactgatccgacaacatgatttgcactaataagatgaaaataagagggatagaaataaaaatttaatgtatatgcactaataatataaaacaattttaggattttacaaattatcatttaaacataaattattattttaaaaatcaacaaatttattatacacaatgaattgtgattaaatgacgatataaatattttacactctcaatacataactttgctcaagaaatatacacaaaatacgatgaaaataatgtattattgacatgaatagaaataacaagaaaaaaacgtagatttttatttgtttgaataaataagagagtataaaacaaaaatatcttcattgcaaaaatgttcatacaaataaaaaataaaatttaatttgaaaaaactgaactttttatttcattatttctcaacataaaaatattttattataaaacaattatttgattttttttaaaatttaaacataagtaaaagtaaaagaacactgctaaccatttctccctccatttcaagtcttagtgagaaatatggtttggttaggactcataatttcatttctcattttctaacacattcaatcaagaatatttttttatctctttatttctcttcattttaattttatatttatttataaatttcttgtatatagtaattattttcaaatggagtaggattaagtcttagtgaaagatgaatgtgtaataaaaaaagctttttctgtgttaagatttgatcccttcaccaaccacatagaaggaaggagaaaagctttgacgtgcgttgtgtagtatagtctcaaattaaagcgggaacaataagaaaggtaatatttcatgagatagaaaatgtagaataatctcaaatttaaacacaagcttcattgttccacaaacaaataataatacagtgtcttgaagttatgccaatgtctctaactctgtaataagttagtccagtttttcaaaacgataacatctagaccaccagagttcgtcgagaaagctaaaatgaaaaagaagaaacaaaagtattgggaacagccccattgaagccactgcataagaaacccacttggaagtgtgattaaatatcaaaaaggaggctgcagtgaaagccacaaccatagcagcaacggagataataagcaaccaacgcccaatagtcaagctgggatgtagtgatttcacaaattggcttcgtgcgaatcttgatgaagtgaaatttgacaagaatgagagtaaagacgcagaagaagtgaataatgcgactgcatttgtcaatatgaagacagtaaaccaggcattggtcttatcacctggaacagtcagagcagccgcaaatgctactgtagcaacaagtgttgacacaagcatgccagattcggccattcctttggctgcatccttaatttcttcggataacttcttgtgttcttcagaaaatatatcaattggtctcatgcccgctttgtttctcattatttttagttcaccaggaacattcgactccacgaactatatacaaatcaagagaatatgtaaatgatggtatccaaatgcataacttaattaatctttcaactatcacttaataactagaacaaattacagcaacacctcccaagatctagtgtaattacacaatttcctgaggtattagagtaaggtttgaggggatgttattgtaatgatttcaaacgtataaagaatgctagtgtaatttttcaaaaaaaattgttacaatatcaacaaatactacatacaatgatttctatttttaattaaaacttgttacttttaaagatttaaaatcagtctagttaacaaaatcctaaaattagtagaattttaaatttttaaaataagattgctagaactgatcgatcccatgcgagtgaataaagaatgtttgaataagaaaaactcagcaaattaattgaccttgaaccatttgatatctctttgcatttgaatgcttgctcttaaactggacaattcttcgaattcaccttgtggaagacgcgcagccaagtgtagaatgttgttacctccgtagtccactgcttgtactgattgctcttttaatcccaatggtataatattaaatattgtttcttgtcgacatagcacaaccaagtgcagtaggttccatccatttctgcggtccctataaggcactaatctattattattgttaataagcctcttcacagccccatcatctcctgattttattgcatcttcacgtttctgttccaatgcttcaacttgagtcaatacttttgtatatagccgactgtctgattcattggcaaacattaatgtgttattcgaataactcaacaaacatcaaataccattattacactcgatatagataattaaggactaattcttaattttttatatagaacaaaaatatatataactttctaaaatcaaaatcaaaatggaaatgatgtcaaataagatctaaattttagcttagatcacaaaaaaaaannnnnnnnnnttgattgttccaattagaaatagccacggtattgttatttgagaaattttaatataggttatagtaggcactacattcagatccttaaacttagggattttgattttgttttagctttgattgtggcgttgtgtatgtaagtctgttattgtatcacataacgtgtcctttctagtacaatttgagagcaaatctgaggagcaaactcactgatccgacgacatgatttgcacttgaaccttttttgttatcttgaatttgatgagaaatcagataaatggaaaaaaaaaataagagggatagaaataaaaatttaatgtatatgcactaataatataaaacaattttaggattttacaaattatcatttaatcataaattattattttaaaaatcaacaaatttattataaacaatgaattatgattggatgatagtagaaattttttacactctcaatatataactctgctcaagaaatatacacaaaataagatgaaataatgtattatttagatgaatagaaataacaaaaaaaaatgtaaatttttatttgtttgaataaataagagagtagaaaacaaaactctcttcattgcaaaaatgttcatacaaataaaaaatcaaatttaatttgaaaaaactgaactttttatttcattatttctcaacataaaaatattttattataaaacaattatttgattttttaaaatttaaacatatgtaaaagaacactgctaaccatttctccctccatttcacgtcttttattgagaaatatggtttgtttaggactcataatttcatttctcattttctaacacattcaatcaagaatatttttttatctctttatttctcttcattttaattttatatttattataattttgttgtagatagtaattcttttcaaatggagtaggattaagtctcagtgaaagatgaatgtgtaataaaaaaagctttttctgtgttatgatttgatcccttcaccaacaacatggaaggaaggggaaaagctttgacgtgcattatgctgtatagtctcaaattaaagcgggaacaataagaaaggtaatatttcatgagatagaaaatgtagaataatctcaaatttaaacacaagcttcattgttccacaaacaaataataatagtgtcttaaagttatgccaatgtctgtaactctgtaataagatagtccagttaggataaacgataatatctggaccacaagtgtttgtcgaaaaagttaaattgaaagagaagaaacagaagtattgggaaaactcccattgaagccactgcataagaaacccacttggaagattgatcaaatatcaaaaaggaagctgcattgaaagccacaaccatagcagcaacggagataataagtaaccaacgcccaaaagtcaagctgggatgcagtgatatcacaaattggctttgcgcgaatcttgatgaagtgaaatttgacaagaatgagagtaaagatgcagaagaagcgaataatgcgactgcatttgtcaatatgaagacaggaaaccacgcattgttcttatgacctggaacagtcagagcagccgcaaatgctactgtagcaacaagtgttgacacaagcatgccagattcggctattcctttggctgtatccttaatttcttgggataacttcttgtgttcttcagaaaatacatcaattggtgtcttgcccatgttgtttctcattgttgttagtttccgaggaacattcgactccacgaactatttacaaatcaagagtatatgtaaatgatggtatccaaatgcataacttaattttcaattatcacttaataactagagcaaatttcagcaatacctcctaaaatttagtgtaattacacaaatatattctcaggtataagcttaaaatttgaagaaatgttagtgtaatattttctacatataagaaatattagtgtaatttttcaaacttaaaaggagttggtataagaaaataaaaaagtggaattacatataactacacgaaacttgagggtaatttgctctaataactattagatattaaatttgtaagaaatacaatttcaaagttaagatattttaaaaataaatcttacgggtgatatttgttgttacaaatgcacttctataatttttaattaaatttttttatcgatctatagattgcctgtttaactattatgctaaagacaatggataacaaattttaaaaaattgttacaataatcaacaaatactacatacaatgatttttatttttaattaaaatttgttacttttaaagatttaaaatcagtctagttaacaaaatcctaaaatttgtggaattttaaaattttaaaataagattgctagaactgatggatcccatgcgagtgaataaagaatggttgaataagaaaaactaagcaaattaattgaccttgaaccatgcgagctctctttgcatttgaatgcttgctcttaaactggacaaatcttcgaattcaactcgtggaagatgcgcagccaagtgtagaatgttgttaccttcattgtccaattctcgtacttgatgctctttaaatgtctctgttatactgttaaatattcttttttgtcgaaatagcacaacccagtgcagtaggttccgtccatttttggggtcctgaaattcacgattcatgtcaatcatcgtcttcacaacctcaacacatcctaattttactgcatgaaacagcactggcgaatcataaacaggtatcaactcctttaaaatcgaattacattccaattggttaacttgagtcaatatttttgtaaatagccgaccagcttctgattccttgtcctccatgtctagcaagcggtatatatatagtttattggtccaaccaatgtttaacatgaaatgaaacaaacaaaagttagattaaaattttattcttatatatatgaagcaccatttttatctctatttaaaaaattatatttttaatccgtacatgaaaaaaaattgtaagatatttttgcacatgtgactcatgggttggcaaacattaatttaatttgtgttattagaataactcaacaaacatcaaataccattattacactggatatataattaaggactaattcttaattttttatataaaacaaaaatatatataactttctaaaataagaatcaaaatggaaatgatgtcaaataagatctaaattttagcttagggcgcgcacacacacacaaaaaaaaaggccattttcaacttgtgaaagcttacctaaaatttctggaagctcttgcgccagcataatattcaatgtaaggtcttttccacttgcaatgaccagagtagttggatgtttttcaaataatttaattgccaaatctgttatatgcacaaattaaatagtacacggcaaggtaaaattccaactaaattgaaaaaccacgtacgagttcatatatatttccttttatatatatgaaatcaatgagaatatagctagataggacctgttcggttttaaaggatgatatcacagactttcagaaacctaataatcataattaattattcaacattttgaattatggtcaattattgtaccgaataacgttggaattatatatatatatatatatatatatatatatatatatatatatatcttatggtatctgatcggttcaatgggttcgtttcagtttgtaaaacatcataatatgtaaaggagaactagattaaaaaaaaaggagaaataaggttgtttaattagttttacacttaccaaacatgctgattctaatggtcatgaaaaacagtcgttcaatatccttgtaatccattttgtcaatcactttccgcgaggacaaaatgtccactattgatctgttgtaacgatattcagcagccaagtgaagtggaagcatcccatctgagtttggtattagcatgtcttctggcctcatacgcttaaccaactctttcacaatttcacccctgccttcacttactgctagatgaagagctgtgtctccccttgagttttgtattagcatgtcttctgccctcatacgcttaaccaactctttcacaatttcaggactgccttcccttgctgctagatgaagagctgtgtctccacttgagttttgtattagcatgtcttctggcctcatacgcttaaccaactctttcgcaatttcaagaccgccgtaactttgtgctgctagatgaagagctgtgtctccacttgagttttgtattagcatgtcttctggcctcatacagttaaccaactctttcacaattgaaagaccgccgcctctacttgctgctagatgaagagttgtgtcttcactatcatttaacggaatgcgtaccatatcaggacatttctcaataatcgattttgattccagccactcatcccgcaatatatgtatcctcagatcttcttttaaagatcctgcaatcctttcaaacttcacattataaaatgtcctttatttaataatcataactttaactatttagttgcaaagaagacccttttaatttatcgtttaccctaaatctgtaaaaattctcttggaaacttgtctcatattttgagaattcctaataatttcatcatttcgaattcatttttttttcaaaatgtaaaataaacaaactcttaagacatgatctctgaaatacaccttgttgtgaatgcaatagtttaaagtataacttactcagctcttctggagtcatttcattcactcctctactttcatgttctggtgttggtgagtttgttgaagtggcaattggagtttgctcatgactttgattggttgtttgatctggtgttggtataatctgaattatgtggtcatctgaaacttcgacgatattggttttcatgatttaattctagggaaaatgaagtgatttggatacctctctaaaatgaagtgatttggtttccctgttctagggaagcttgaacatattatatatggtggtaaaacaagagcccttaattagttttccaacttacacttaaaataattattcccaatatgacattttgtggattacagcaatgttcaatctgttccacacctcaaccctacagttttcaaaagctttttaacttgaatggtttctaaatttataatattaattcttttttaaagtgaataaatatattcattaaatttgttaacagaaaaaaaaaatcattatagaaaaaattatattcattaaattgtggggattagcgagactcagctatcatgacactgttaattaacttactctcaatttcatattacctgtcttcgttgtacaatgatatgatagaggtggttatatatttattatatatttatctaacttccgttgacgcatttataatagttatagtcaactactccaacaaccattgaattaaaagcaagactagatgcattttgttatcgaaaaatgtatgaattttattaaactcactacaacaaccattgaattcaaagcaagactagaaaaaaaaaatacttatttaacattttaatcaaatctattcagttatattgataataatttttatgatgtttttatctctttatgtatgaaatttaatatattaataaatttgtcataatttttattttcaaaaattaaaattaaaattttcatttttaagaaattaatttattaacattttatacatttcaaaagataaaaataattaataactaacacaatttttataaagtttaggaagacgcaaactataatgggagagtgtaatgggtctcttagagtcagaaagtattttttgaccatcagttaccttgtttaaaaatcaatgaccgtaaatttttcttctttgattattattttccctttttttgtcctcctctttcctgtactacccttttcctctttcttcttctcttctttcccattcttcctctcttagtctaagcgacaacggtggtgccatgacagttgatgatagtgggaatgttgatgtgtcgttgtctgacctttgtgcggagtaaacttgagagaactcgagagggtcttgcgttgttttgccacaagatttcaacaggagaaaaagcatggaagacgaaacagtcacaaagcttgatataactattgcctcacttaaacccaaattggattcaattgaacaaacccagattttagtctcccaaagttttgagcttttttatattttttgtgtacgtgttgatttttctcaagggtgtcaagttacgagtttgtttcttgcataaacgttgtttctataccattttactctcaattttgaatccaatttgggagaataaaagacctaagattttggttttgaaaatcaaatgacattttttatgacgatttgtgattatatttgaaattgcagtttcaaggaaattattgtaccattgatatgtaatattttatatttgtaacctggccttgttttctatgtggctctgcagccatagtgaccatatgtggatgtggaatagggtaaaaggaggaaagggaggggttgccgaaaattgctttctgcgtaggtgtcgttgtcggagacaagaaaaatggaagaaaaggaataaatcgacaatgatgatgaataagccagagggataaatcgggaaaatcaagaagaaaaggaaaaaatataaagaaaaaagaagaaaaaaaattcatccatgggattaaaatttgataaatctaatggtggaaattcactttcccattgtggaagacctattatattctcccacactagtctttgttagattagagattaaattattcattatgaaagatttaatactaaaaataatattcaacgaaagtattgagtctaaacatatattttatccaaaatatttcaaatcttgctttgaattagttgttgacacttgaaactttgtttcatactaaatagtgcaagatgtaactatatatataaggtttaggatttaggatttaaatcatggataataagaaccctaaatcctaaattataaatcacatggaaagaaaaagactttgacatggtgtaacatcccgggcgctgacgagggcggggagtgatcgccggtgcagtgaggcacggacaaagagcggctcctggcaggcttccagtgggaggggtacatgaatgaatcgaacacacacccgaacgagagggatccagaggctgtgcaggtatgggactgtacagttgaggataacttaaaggatttaataggtactacctataccaacaaggtgcatctacttttcggtcgcccataacataagaactccacagttaagcgtgcttgacttggagcaatcttgggatgggtgacctcctgggaagtttctcaggaagtgtgtgagtgaggacaaaacacactgaaaagtcttgtgttggtatgtagggacagtcgttgatcctgcaagtggccgggcgttacacatggtgtatgtgtagtttacagaaaagataacatggattaattatagtatgtttgaattttggctttaaatttatcatgaaatatggtgagataagtcaaatttaattttatctaaaacctgttaaatggcttatgactccacctgtagtaattttacaatttataatttttatgtatttaattattatattttaattaataaaatatattattattaatatgttagtatttaagttaacattattttattatcattataatacatatttatgacaatttaataaaaccatgataataaaaaattaccataattattacaacaacatgttagtgttaattaaattataatccatattatctcatgcatcaattatttttagactataaaaatattcctaattaaataagagcaaaattatattagcatatatatttagaagagagaaacattaatgaccataatatttttgaaaacatattattttaaaacaaattttttactatcaactttgttaattattttttaatcttaatgaattagataattgagtcttataaataggaataaatagtataatatagtagatagtagatagtagattttgcatgtttagttattttagtataatcaattttaattgaaaaaaatatggtagaattaaagtaggaatagcttctacttctatcaaaataaattctagtagattttgtctaatttactttcacatcaatactcttatacatatctgtttttttttattgatttaaaaacataattaaaattcttgctatatttatagattctagttgttatannnnnnnnnnnnnnnnnnnnnnnnnnnnnnnnnnnnnnnnnnnnnnnnnnnnnnnnnnnnnnnnnnnnnnnnnnnnnnnnnnnnnnnnnnnnnnnnnnnnnnnnnnnnnnnnnnnnnnnnnnnnnnnnnnnnnnnnnnnnnnnnnnnnnnnnnnnnnnnnnnnnnnnnnnnnnnnnnnnnnnnnnnnnnnnnnnnnnnnnnnnnnnnnnnnnnnnnnnnnnnnnnnnnnnnnnnnnnnnnnnnnnnnnnnnnnnnnnnnnnnnnnnnnnnnnnnnnnnnnnnnnnnnnnnnnnnnnnnnnnnnnnnnnnnnnnnnnnnnnnnnnnnnnnnnnnnnnnnnnnnnnnnnnnnnnnnnnnnnnnnnnnnnnnnnnnnnnnnnnnnnnnnnnnnnnnnnnnnnnnnnnnnnnnnnnnnnnnnnnnnnnnnnnnnnnnnnnnnnnnnnnnnnnnnnnnnnnnnnnnnnnnnnnnnnnnnnnnnnnnnnnnnnnnnnnnnnnnnnnnnnnnnnnnnnnnnnnnnnnnnnnnnnnnnnnnnnnnnnnnnnnnnnnnnnnnnnnnnnnnnnnnnnnnnnnnnnnnnnnnnnnnnnnnnnnnnnnnnnnnnnnnnnnnnngtattctttcttattttattgtagatgcactttctcttatatgctaaattttatttttcatcttgtccttaaaaagtaaacaaaggaacatttgtgtgcatcacttagtgcatcaattggaaacatttaggcaattagctatttacgcgtaaatacagaataattaatacgtaataactccaatggtaacatttatttgtagtcgttaatattgaaataggatgccaaatttgtacagccctacaccgtatgtaccattatacagtgtagctgcatttattccatacatataacatgcatatttaatactaccttagatttttttataagaaataaattttagtgtagaatacactacaatttatttctcttacattaccttcgaaggaataatgcaatacatatatatatatatatatatatatatatatatatatgtaaaggcggatccagccttaaattttgatataaaattacaaatataccctcatcattaaaaaaattcacaaatatagcctttgtgagtctgtctgctatgctctgcttcttcctctctccctgctccacgcgaccacgcctccgccagcaccacgcgttctgctattctgtttccgagctcggtgcttctgcttctccgcttctaggcttctggttctggactccgaggctgaaggtgaaggctccgactccgaggccctagctgccggctgcgtgcctgctttgccgagcttccgtctccacggctccacgcctccacagtccacctccaggttaagttttgattttgtttctcaatctggccatacatgatacacatattgcatatttaatagaaacacataaacacaaaatcaagcataaccaaaactaaacacaaaaaaggggaattaatgagggttttgaaagagaggagtaccgtgaatttgatcccatttccgattgttcatcactggcttcagaatgcaagtttaaaatttgttatctataaccagagagataatagagtagaccgtaccgggaatttcgacgacaagtcagttgtgttctgctttgattatgtccaaagcttagtttttccgtattgaaattggtctcccctgcatttggttgtatgaatttatgttaaattatgtaagtggtttcagaatcttcccatttattgtatgaacatggaagaatttttagtttgattaatatgttggctattgctaatggtttcaaaatcttcccattcaagctacgatgctctagttaagtagttatacttggtggttgatcccctgcttatttgcattgaaccagtcagttattgctttggtaaagcatttcatggaaagtaagaagctagttgcatctatttagttgctgccaatgtacttaaggtataattagtactgatttacttataaaatatattgtgttcaagtcaaccacatcagaaatgagtacataatcatgcagtttagattctttagaaaggaaaaagatgttgatagtttgtgtagtctttgactcttaaggtatgttcaacactgtgcaacactaaagggaaagaaagaaggcattttgagagaggggagcacctgttgttgtaattaatctactcatcctttgtttgttactttgtttactagtggataaggattattttcaaggatcttgctatgatgatcaatagttgctagctagattcatttagtcggtgctgctaaattatagatgctaaagtcaatgatgtttagaaattagatcataggagacattttgtcagttttataagcaacaatgaaaattacatagtttaggcaaattggatttctctttaatggattggtgaagagaagaaaaattaactgctatgtaattaaataaatgtcttgatttgttcaaggaaaagcaactctttaaccaagtgaggaatgggaatttggagattgagtgatcattttaaaatctaagtgggctttggtgtccagtgttagagttaactggttaaccgatacatgtctgcataagttgactgaaacttgtaacaacttatgttgaattagcttcttgaataatcccgtgtgccaattaagtaatctttctgtcttgaaagaattgacacgattttctacagtgattatatgaacagtggactattagtaagttgaaatttgtatctatccatctatttgcttatagatataggattaatttaagtttaataaatgcactagtaatttaagtttaatatagtgattcttaagataaatgggttgctgagagaataaggaattgcacgcatcaaaataaaaggactggatgatgttttgtttctatgattaggagatccttgggtgattagcatgtatgatattttggaaaataaatggagccaatttcttaagttttggttagctaatagctatctttatttctttcaatgggtatcttaatgcataagtaactttacttatagtaaaatgaggtgggaaaactcaaaaaaagtagctttgtctaatttaagaaagtaagagaatannnnnnnnnnnnnnnnnnnnnnnnnnnnnnnnnnnnnnnnnnnnnnnnnnnnnnnnnnnnnnnnnnnnnnnnnnnnnnnnnnnnnnnnnnnnnnnnnnnnnnnnnnnnnnnnnnnnnnnnnnnnnnnnnnnnnnnnnnnnnnnnnnnnnnnnnnnnnnnnnnnnnnnnnnnnnnnnnnnnnnnnnnnnnnnnnnnnnnnnnnnnnnnnnnnnnnnnnnnnnnnnnnnnnnnnnnnnnnnnnnnnnnnnnnnnnnnnnnnnnnnnnnnnnnnnnnnnnnnnnnnnnnnnnnnnnnnnnnnnnnnnnnnnnnnnnnnnnnnnnnnnnnnnnnnnnnnnnnnnnnnnnnnnnnnnnnnnnnnnnnnnnnnnnnnnnnnnnnnnnnnnnnnnnnnnnnnnnnnnnnnnnnnnnnnnnnnnnnnnnnnnnnnnnnnnnnnnnnnnnnnnnnnnnnnnnnnnnnnnnnnnnnnnnnnnnnnnnnnnnnnnnnnnnnnnnnnnnnnnnnnnnnnnnnnnnnnnnnnnnnnnnnnnnnnnnnnnnnnnnnnnnnnnnnnnnnnnnnnnnnnnnnnnnnnnnnnnnnnnnnnnnnnnnnnnnnnnnnnnnnnnnnnnnnnnnnnnnnnnnnnnnnnnnnnnnnnnnnnnnnnnnnnnnnnnnnnnnnnnnnnnnnnnnnnnnnnnnnnnnnnnnnnnnnnnnnnnnnnnnnnnnnacttttgaatgttccccttgttttattttttggattcgccaaaatatatatatatatatatatatatatatatatatattcttgatatatatactaaaactttcaccttgccaccacatttataatattctctaacctgaaaaaaacatgaaagacaagacacatttaataatcccaacagacaaagacactatggatctgaatgcccagaatatttggtcatggtagtttagtaaaaggataaattatcttttcagtccatatattttttaataaaacttgatattagttgttctcaaattttagtcttaattaatttaattcttgaatttgaaaaaagacaataatttgttcctcctcagaataaaaataatgatgaaaccagtattatttttctaaggtttaaatattaatttgatgaaaataaaaatatggaaactaatagtaattaatatttatcgagagcacggagattaaaaatatgccttgttaaggctagatcgacaccgaaagaggtttaggattttctaaatacacggattccgtaatcttcatacacatataattaattttattttgaatattgaattatttctcatgctattactttcataacaattttttttaatatatatttaatacacatataagtttacataataaattatgttaagaaaatataaacaaagaaattgtttgaaaaaaattatatattttttaataattatttccattatttttctaatctaagattattattttttattatataatatacttatttgattttgaatatgtaagcaccactaatcgcttctctataaaactaatctcgcgtcaaactagtttgtttaaatttaaaataaatattttttaaatgagcacttatttaataaacaaaatacgttgatcaaaataagcacacaacttttttaagcataaacacaatttagacaaatacactaaaaaacagaaaattatttattttattaaaataaatattttttcaacaaataaatttaagcatacttattgaagaacatcacttgatttacaagcaggatttgggctaattagctagtacacattaagacaattataaagtgattagaataattaactacccagtgtgggacttgcgtgtgcctaccatgaggtgaaccttatctaaggtggaacataaagaatattcttatggttttgaatctacttggaatactaataagaaagacgtgaaactaaaattccaaagtacaattaacttggtcctagctctagatagatccacatgcttacatgcctccgtccctaattggagatatatgaagtttatatttgatatggataagttctaggaaacacagaatagccgggactcaatctcaaaatttggaatatctataatttcttattaaaatgctgatctaaatggttcttaacaaaataacaatggttgtgacatatacttgctcccttcaccaaccacagggaaagaaggggcaaagctttgacttaggatatgcagttttcggaaaaggcattatagtctcagattaagtcggaaacactaagataggaaatgcacaatagtcttaaattcaaagacgaacttaattgtttcacaaacaaataacacagtgtggacactgccacactgtctataaatcaagatacaaaatctgaggagaaagttttaattagattttgccagtgtctataattatgtaataagttactagagttcgaatggaagataaaatctagaccacaagtgtttgtcgaaaaagttaaattgaaagagaagaaacagaagtattgggaaaacccccattgaagccactgcatgagaaacccacttggaagtgtgttcaaatatcaaaaaggaggctgcaatgaaagccacaaccatagcagcaacggagataataagtaaccaacgcccaaaagtcaagctgggatgtagtgatatcataaattctcttagtccgaaacttaatgaagttaaatttgacaagaatgagagtaaagacgcagaagaagtgaataatgtgactgtatttgtcaatatgaagacactaaaccacgcattggtcttatcaccaggaatagtcagaccaaccgcaagtgctacggtagcaattgttgacacaagcatcccagattccggtactgtggtaacatgtggcttcactaactctggtataagttaaacgataaaatctagaccacaagtgtttgtcgaaaaagttaaattgaaagagaagaaacagaagtagttggaaaatccccattgaagccactgcataagaaacccacttgggagtgtgatcaaatatcaaaaaggaggctgcagggaaaaacatctaatccccattgaagtgtgataaaaaaattgtaagatatttttgcacatgtggctcatgtgttgccaaacattaatttgtgttattagaataactcaacaaacatcgaataccattactaattcaggctgagtgctaataataaagctcacatccacatcatcatttcctgattttattgcatcaaacacgaggagcccaagagaaataacaaggtaatatatcaattacttctcagtagttagcttaaatttttcttgtgtgattaaaccttctccggagtaatagtaattatctattgtctatgcagactgtgaagcttttgctggttacaaaagaatttacttcagtcattcgggaaattcacaagttgcgtcactgacgtgcgaatacaagtacatttaatagtctgtaatacaaagaaccaaaactatctggttttgttaaaacttttggtgaaaactgttgttgtaattgagcaaactattcactatagaatcagcactagcacataatgtggaaattctagctgagagatgcaacattctaaagaaccttgcagcagcttgatgttaaatattatatgaacaatgatttttttttttttttcatgatttgcacagagcctggacattgcagtggcagaggaagggggtatcgatgtcagaagagaagcatgaggaataccctgaatggtccttgtctgatatggaaaaaatgaactttgatcccatgcagctagctgattaacttaaatggaaggattgatcgatgaagaggattatgatgaagaaatgtagatgaacctgttttggtttagaaagttctaattgagaattagagtagaatgtttaggagtagtattgcacaaatccttagtggttaggaagattaggagggacaggacattgaaaactttagtccttacaacctttgttttaggataaaagtggagatatatattgttccagttagaaatagccaatgtattgttatttgagaaattttaatctcatataggtcttgcctatggtaggcactacattcagatccttaaacttacggatattgattttgtttggattgtcagctttgattgtggcgttgtgtatgtaagtctgttattgtatcacatgacgtttcctatcgaggacaatttgagagagcaaatctgcggagcaaactcactgatccgacgacttaataatgatttgcacttggaccttttttgttatcttgaatttgatgagaaatcagataaatggaaaagaaataagagggatagaaataaaagtttaatatctatgtatagaacagttttaggattttacaaattatcattccatcataaattattattttaaaagtcaacaaatttgttatacatagaattgtgattggatgattatataaatttttttatattctcaatttattatacatagaattgtgattggatgattatataaatttttttatattctcaatgcataactcttttctagaaataaacacaaaataagatgaaaaagatgtattatatagatgaatagaaataacaagaaaaaatgtaaatttttatttgtttaaataaataagagagtagaaaacaaaaatatggtcattgcaaaaatgttcatagaaataaaaaatcaaatttaatttgaaaaccctgaactttttatttcattatttatcaacataaaaatattgttataaaacaataatttgaatttttaaatttaaacataagtaaaaaaacactgcaaacaattttttcctccatttcacgtctcttaatgagaaatatggtttggttaggactcattaattataatttcatttttcattttctgacacattcaatcaagaatattttttttattacttatttctcttcattttaattttatacttattataattttgttgtatataataattccttttaaattgattaagattaagtctcaatgaaagatgaatttataacaaaaaaaaactttttatgtgatatgatttgctcccgtcaccaatccacatggaaggaaggggaaaagctttgacgtgggttatgcagcatagtctcaaattaaggcgggaacaataagaaaggtaatatttcatgagatagaaaatgtagaataatctcaaatttaaacacaagcttcattgttccacaaacaaataataatacagtgccttaaagttatgccaatgtctgtaattctgtaataagttagctagtcctgtttggacaaacgagaaaatctagaccacaagtgtttgtcgaaaaagttaaattgaaagagaagaaacagaagtattgggaaaagccccattcaagccactgcataagaaacccacttggaagtgtaatcaaatatcaaaaaggaggctgcagtgaaagccacaaccatagcagcaacggagataataagtaaccatcgccctaaagtcaagctgggatgtagtgatatcacaaattcgctttgtgcgaatcttgatgaagtgaaatttgacaagactgagagtaaagacgcagaagaagtgaataatgcgactgtatttgtcaatatgaagacagtaaaccagacattggtcttatcacctggaacagtgagagcagccgcaaatgctacggtagcaacaagtgttgacacaagcatgccagattcggctattcctttggctgtttccttaatttcttcggataacttcttgtgttcatcataaaatacatcaattggcatcttgcccattttgtttctcattgctcttagttcacgaggaacattcgactccacgaactatttacaaatcaagagtacatgtaaatgatggtatccaattgcataacttaattaatcttataacttaattaatctttcaattgtcacttaattaataactagagcaaattccagcaatacctcctaaaatttagtgtaattacacaaatatatatatatatatatatatatatatatatattctcagttataagcttaaaatttgaagaaatgttagtgtaatattttgaaacatataagaaatgttggtgtaatttttcaaacttaaaaggagttagtataagaaaataaaaaaaaaatggaattacatataactacacgaaactggagaacaattattgtaatttgctctaataactattagatattaaatttgtaagaaatacaatttcaaagttaagatattttaaaaataaatcttacgggtgatatttattgttacaaatgcacgtgtataatttttaattaaaattttctatgcatatattggctgtttaactattatgctaaagacaatggataacaaattttaaaaattattacaataatcaacaaatactacatacaatgatttctatttttaatgaatacttgttacttttaaagatttaaaatcagtctagttaataaaagcctaaaatttgtggaattttaaaaattttaaaataagattgctagaactgatggatcccatgcgagtgaataaaaatggttgaataagaaaaactaagcaaattaattgaccttgaaccatcggagctccctttgcatttgaaagcttgctcttaaactggacaaatcttcgaattcaactcgtggaagatgcgcagccaagtgtagaatgttgttactttcattgtccacttctcgtactatatgctcttctaatttcgatagtatcctattaaatattccatttcgtcgaaatagcacaaccaagtgcagtaggttccgtccattttcggggtcctttattctcactaattcaggctgagtgctaataataaagctcacattcacatcatcatttcctgattttattgcatcaaacagcactgacgaagtctccaaatagccaacgacattctagtctctcgccctccttcatgtctagtaagaggtccatatatagttgattggtccaaccaatatttaacatgaaatgaaacaaacaaaacttaaatttaaattttattcttatatataagaagcaccatttttttatctctatttaaaaaattatatattttaatccgtacatgaaaaaaaattgtaagatatttttgcacatgtggctcatgggttgccaaacattaatttgtgttattagaataactcaacaaacatctaataccattattacactggatatagatatttaaggactaattcttaattttttttatataaaacaattatatataactttctaaaataagaatcaaaatggaaattaatgatgtcaaataagacctaaattttagcttagcgcacacacacaaaaataaaaagccattttcaacatgtgaaagcttacctaatttttttggaggctttcgcgccagcatatgcaatgctgtaaggttctctttatttcttgcaatggccagagtagttggatgttttccaaataatcgcaatgccaaatctgttatatgcacaaattaagtaaaactccaactaaattgaaaaaccacgtacttagttcatatgtatctccttttatatatctgttatatgcacaaattaagtaaaactccaaccaaatctgtctcgacgtattgctacatgaaaagctgtgtctccacttgagttttgtattagcatgtcttctggcctcatacggttatccaactctcaaacaatttcacggctggcccaacgtactgctacatgaagtgctgtgtctccacttgagttttgtattagcatgtcttctgctcattctccctgttatgtcaaacaaaatagcactcaattgtcaagcttaccactttaattaatctgagttgtgaatcaaaattcatgaagaattgagatatgagttagatatacaatctcatccacctaacagtcaagagaggacaccgacaagcaatgcattccgtgaaattatatattcaagatattacctgaaattactaagagttaataactgcgttatttctttatttacctccagcaatgtactccacattaggattgttagccaattcttcatacctgagatgattataggatgatatgaaaaaaattatcttaaaaaaacatcctgctattaaaatattagcttgaaaagaatttagtgaggagagaaagctaaaaatatttccagagctggaggttgaatatccaattattacaccaagttctcaatttacaaattttctaaaaaaaaatatacacatcaagtatttagtatgataattaactaaaacttgagattttccttttccttaacaacagtcaaccgtaaagcataggaagagcaaagcggatgagaagtgggtataacagtttcatacatcccaaagacaagaaccacatcatattagtatgtttatgtaattaagaacttgcaacactgacactcacagtaccagaataacagtaggtttaataaaattgtcaaacaactaacataaattcctttatctcaagtttttaaacaatgaacattgatactttatatttgtctgggaaagtaaaatagttctaaatcttccaataagtcactgataaaataaatcttccaataagtccccctaattattctctttaagtttcccatttttagcctcggaatcaaattaagagacaaagtcatttagatgcaagatccaagcaagacatcaatgtacttagaattattccaataccacctccatcaagagaaaaaaacaggaataaagaaaatagtagggcaatatagaatttgaaataaatgagcaacttactattttttcaaatagttctccattaaccaactaacagctatgtctgcatgaaagaaaaatggtaaaatacacacacaaccttatggctaattatagttgctccagcaaagaagtatcttgtaatccagccatcttcatttttgtccttcatgaagaagtagccagtgggtaaatgaattgtatctatgaaaagttaaaaactcactactctttgttaagatattgactaatatcataaacaaaacaaccaacaaatgatgatggccaaactgattaacagcgttatgttcggttcacctcaaagtggtaggcaaatgctttgtggcacatgatatgaacaaattaaaggctatcctttttcatccatttggatatcttcatgagaagatctttatagttcttcatatgctgcatgaaggtcaaaactgacttttaaattcaagaaaacatggcttcaacattaatcaatttctcgtccaaaatctattatgttttgatttttttttttccaaagcatgttttaaaataaaaacagaaacagttgaatgtattctcatcctcttcttctatctggtgatcctagcttaagggtgtgagtaatctgtagtagtgagacatgagcttagtgtggatgtccggtttatttaaactaaaaacatttttttttaaaatagaaatcaaataaacaggatcaatgtctactggcagcatagaagtcaaaggaacttctaagctaaaactaccaatcaactactgctttatttttaaacctttctattatgagtttatttaaaatattattaagccaaaacaaaaaaagcttgtgcaaaagtcaatacataggttagacgtttcataatcagcataaggaaagataaagcaagagggtaaaattagttttttagtgtgagcaattttttttaaaattacctgtaattgagtttgtttccgagcactaacttgaagaaagcggtaggcaattcataaagttgcgaatttgtcccatcagtgtcgattgctatgggcatctgttgtagagctgaaagagtagcagacatgaaattgataagagttgatattgttttgatgttgagttaagaagagagagagagagagagagtgagagacagtacaatgcgcaaagtgaagaagatcggagagttgaagttcggaggatgatttgtagccagagcgaaggatattagccaccatgaagcgaccatatctcctagtgacaaagtcagggagcaagttgcgttcgagtgcagccagaatgagcttcaccgcagtgttgtacgcaagctgcttcatcccttccattaaaccacgccctaggtgaggattcagcggaaatgtcagcatttgcgacgtgggaaagagagagagagagagagagactgagcatatgatgaaggcagaagagttggaggatgaagctgaaattttaatttttttttccgcttcgtgcttggcttcggattctggtggtggttcccttatggttcctgctccggatgaagaaactgagaaactctgttagcatgacacgttttattcgaagcggaaaatttttgtgagaaggacttatgtgctccatagttgagagctgctgtaaggttgacagctcagcaaaaccaacattgttttagtatatatatatatatatatacatatagaatatagatatatatttatatgtatagatattatctagaaataatatttatatataattgtgatttgatgattatgtaaatttttttacattttaaatatataattcttttttataaataaacataaaataattaaaatgaagagatctcttatttagatgaataaaaaataaaaaggaaaaaatataaatttttatttgtttgaataaataaagagtagaaaataaaaatatgatcgttgcaaaaatgttcatacaaataaaaaatcaaacttaatttgaaaaacatgaactttttatttcattatttctcaacataaaaatattttgttataaaataattatttgatgacattaaaagaatactgctaaccatttctctgtccgtttcacgtttcttaatgagaaatatggtactcattaattataatttcattctcatttcctaacacattcaatcaatcaagaatatttttttatttttatttatcttcaatttaattttatatttattataattttgttgtatatagtaattcttttcaaatggagtaagattaagtctcagtgaaagatgaatgtgtaataaaaaaaaaagagctttttctgtgttatgatttgctcccttcaccaacacatggaaggaaggggaaaagctttgacctgggttatacattatagtctcaaattaaggcggaaacaataagaaaagtaatatttcatgcatagaaaatgtagaataatctcaaatttaaacacaagcttcattgttcaatataaaattaacaattctttgcgttaaagttatgacaatgtctgtaactctgtaactctgcgtgtaactctgtctctaactctgtctcttactctgcctgtaatctgctgtaataagttaatttgtccagtttggacaaacgataaaatctagaccacaagtgtttgtcgaaaaagttaaattgaaaaagaagaaacagaagtagtgggaaaagtcccattgaagccactgcataagaaacccacttggaagtgtgatcaaatatcaaaaaggaggctgcagtgaaagccacaaccatagcagcaacggagataataagtaaccaacgcccaaaagtcaagctgagatgtagtgatatcacaaattcgctttttgcgaatcttgatgaagtgaaatttgacaagaatgagagtaaagacgcagaagaagcgaataatgcgaatgcatttgtcaatatgaaggcaggaaaccacgcattggtcttatcacctggaacagtcagagcagccgcaaatgctacggtagcaacaagtattgacacaagcatgccagattcggctattcctttggctgtatccttaatttctttagataacttcttgtgttcttcataaaatacatcaatcggtgtcttgcccatgttgtttctcattgttcttagttcacccggaacaatcgactccacgaactatttacaaatcaagagtatatgtaaatgatggtatccaaatgcataacttaattaatctttcaattatcacttaattaataactagagcaaattaaaacaatgctttatgaggtttagtaaggtttgagggaatgttaatgtaatgttttgaatataagagatgttaacttaaaagttagtgtaggaaaataaaaaaataaaaaaaattatatataatgacacgaaacctcaatgaattattgtaatttgctttaataactattacatattaaatttgtaagaaatacaatttcaaagttaagatattttaaaaataaatcttgtgggtgatatttgttgttacaaatgcacttctatagtttttaattaaaattttctatcaatctatatattgcctgtttaactattatgcatgctaaagacaatggataacaaattttaaaaaattgttacaataatcaacaaatactacatacaatgatttctatttttaattaaaacttgttacttttaaggatttaaaatcagtctagttaacaaaagcctaaaatgtgtggaatttttaaatttttaaaaaaagatttttagaactgatggatcccatgcatgcgagtgaataaagaaaaactaagcaaattaattgaccttgaaccatgcgatatctctttgcatttgattaatgcttgctcttaaactggaaaaatcttcgaattcaactggtggaagatgcgcagccaagtgtagaatgttgttaccttcattgtccacttctcgtagtcgatggtcgtctactgtccatggtatcgagtataatattcttttttgtcgaaatagcacaaccaagtgcagtaggttccgtccattttcggggtcctttattctcactaattcaggctgcagagtgctaataataaagctaaaatgcacatcatttcctgattttattgcatcaaacagcactgacgaaggattagttatctcgtctatcatccgcttatgttccaattggttaacttgactccataatttttcaaatagccgaccagcttctgatctcttaacgtccttctcgcctggcaagaggtatatatatagttgattggtccaaccaatgtttaacatgaaatgaaacaaactaaagttaaatttaaattttatccttatatatatgaagcaccattttttatctctatttaaaaaattatatattttaatccgtacatgaaaaaaaaattgtaagatatttttgcacatgtgacgactgatgtgttggcaaacattaatttgttttattagaataactcaacaaacatctaattccattattacactggatattgataattaaggactaattcttaatttttaatgatgtcaaataagacctaaattttagcttagcgcacacacaaaaataaaaagccattttcaacttgtgaaagcatacctaaattttttggagactttcgcgccagcatatgcaatgctgtaaggttctcttcatttcttgcaatggccagagtagttggatgtttttcaaataatcgcattgccaaatctgttatatgcacaaattaagtaaaactccaactaaattgaaaaaccacgtacttagttcatatatatctccttttatatatctgttatatgcacaaattaagtaaaactccaaccaaattcgtctcgacgtattgctacatgaagagctgtgtctccacttgagtttggtattagcatgtcttctggcctcatacgcttaaccaactctttcacaatatcaaggttgccgtaactttgtgctgctagatgaagagctgtgtctccactatcatttaacggaaagcgtaccatattaggacatttatcaataatcgattttacttggagccactgatcccaacatacatgtcttatcagatcttcttttaaagaacctgcaatcgtttcaaacttcacattataacatgtcctttatataataatcataacttttactatttagttgcaaagaagacccttttaatttctcgtttaccctaaatctgtaaaaattctcctggaaacttgtctcaaattttgaattcctaataatttcatcatttgtaaattgaaatctacctgagaaatttgagattatgtagtagtcgaagggatccaatcatcaatcacctttaattaagtttgaaaattaattctatgatgataagtaaaattgtttttgagagaagtaatttattttttattttcttcagttgacaaaagctaattgatcttaacatgtgacttatttatactcactttaaaaatgattctacttttttttttatctttcgaataaaaaaaatagttttctgaacccattgttgaaatttcattcgtataataatagtataaatattttttttttaacgtcaaggggtttcaaattcaatttttttcaaaatgtaaaataaacaaactcttaagacatgatctctgaaatgcaccctcttgtgaatgcaatagtttaaagtataacttactcagctcttctggagtcatttcattcactcctctactttcatgttttggtgccggcgagtttgttgaagtggcaattggagtttgctcatgactttgattaatctgaattatgtggtcatctgaaacttcgctattggagttcatgatttaattctagggaaaatgaagtgatttggagacttctctgaaattccctgttctataagtgttgcttctttctttccagtctgcgaagcttgaacatattatatatggtggtaaaacaagagcccttaattagttttccaacttacacttaaaataattattcctatatgacattttgtggattacagcaatgttcaatctgttcaacacctcaaccctacagttttcaaaagctttttaagttgaaagatttctaaatttataatattaattcttttttaaagagaataaatatattcattaaatttgttaactgaaaaaaattatacacattaaattgtgtggattaattagcgagactcagctatcatgacactgttaattaacttactctcaatttaatgttaactttcttcattggacaatgatatgatcgatatctttacacacctaaaaagtaaactacacaaactatcccttaagttttgtgaaattatataaactttcttatacctttttaaacatttacaacaatctcgcttatagttataggggcacaaaaaacatgaaaagtttgtataatttcatgaagccctataaaaatggttaatgcaatttattcttttttaaatgtgtaatggaagaaacacttacgcatagagatgttgcgcaaattgactcagtaaaaaaaccttaaccgaaccaatttatcaaattattttgaccaattcattttaaatccaaatagtcaaattactataggaaattggtttgaaatcgaattagttttataaatattagtttgaattgaattgattttgaattagttttaannnnnnnnnnnnnnnnnnnnnnnnnnnnnnnnnnnnnnnnnnnnnnnnnnnnnnnnnnnnnnnnnnnnnnnnnnnnnnnnnnnnnnnnnnnnnnnnnnnnnnnnnnnnnnnnnnnnnnnnnnnnnnnnnnnnnnnnnnnnnnnnnnnnnnnnnnnnnnnnnnnnnnnnnnnnnnnnnnnnnnnnnnnnnnnnnnnnnnnnnnnnnnnnnnnnnnnnnnnnnnnnnnnnnnnnnnnnnnnnnnnnnnnnnnnnnnnnnnnnnnnnnnnnnnnnnnnnnnnnnnnnnnnnnnnnnnnnnnnnnnnnnnnnnnnnnnnnnnnnnnnnnnnnnnnnnnnnnnnnnnnnnnnnnnnnnnnnnnnnnnnnnnnnnnnnnnnnnnnnnnnnnnnnnnnnnnnnnnnnnnnnnnnnnnnnnnnnnnnnnnnnnnnnnnnnnnnnnnnnnnnnnnnnnnnnnnnnnnnnnnnnnnnnnnnnnnnnnnnnnnnnnnnnnnnnnnnnnnnnnnnnnnnnnnnnnnnnnnnnnnnnnnnaatcgaaccagttttataaaaatgattcggttaattgaacaaacttttgtacaacagtgtaattcatctttttttaaaccagttcagattaatcaagtttattttttttaactcccctatttacggatgttttgtgctttcagaacacctatttagtaaccaaaatatgaatgcatatacgtaagtacatgcaaaaataattacaaaacatgtgattaggagcatatatatagtacattatgggacatttagataaatataaatgtatttcaaaattcaagtattttgtaatgatattttaaatgtgttatagaatagatattacagaacatcttacggagagatgttctttcagcacacctattccataaccaaaatatcatactttcaaaatgcatatattatgtaatatattaaaaaataataacagaaagggcattttaaacacctaacgaatatgtattgttcttctgacatacttattaacctatcatatttcccagaatgcgtattccacaatacattaaaaaaataattacggaacatgtaatctagaacaaataatgagaagtattttgggagtcactcttaagtgagaaaggaggtgtaacgtaagttaatttttataggatgcaggaagagaaaagagacaactcaatgttaataaagaaagaaaaaaaagaaaaggaaacacacaaaagaaactagagtggaccaactcaaaggattatgaaaggaaactagcatgcaccacagttatatatatacaaattaaaggttgaaggaaagaaatcatacccaaatgtcttgttaatgaagaacgatggagataaagaaatgcccgtgggatgtgtgaggaggacccttgtcttgttgttgctgtacgttgatcagtgtctgagtgacgagggagcggtttctgagcaatgttatatgcaaagagagtgaatcttaatgagacttaacggtgtgtgtgtgcctgcagatgaggctgtggactatatataatttattaggtggtccggaacaaacacaatcaatatcttcactgttttttatatgacatatagtgttattattcttttcataaattataaactttgaatgcatgttatgtagacattggttgagattatgaaaacaaagtgattccacatacactatttaattaatttcttgtgggtagctgatatgcgcccagcatatgaggattttccaagcttttagaccaagaattaagcatagagcattcattattgccctctgtatgcgtgttttgagctatcttgatgtattgacaggaaatcgaccaaaataccaagaaaaaggccaaatcagaggagaaagagccaagcctgaagaaacatctggcgccaccagcgccaggagtggcgccaaaggcgccatgggttctggaacctggcgccaagggcgccagtatcgcgcctgtagcgtcattaactctggaagatggcgccaagagcgccagattcgcgcttaaagcgccataacctctgcaagtcggcgtcagaagcgccaaaaccacgcctgaagcgctgcaatcactggagtcccgcgccaagagcgccgtatttcgcgccaagggcgccataagtatctgcagctggcgccaagagcgccgataccgcgccatgggcgccgcattctctgtaagctggcgcctggagcgccagattggcgccaagagcgccacaggtcgacagcagccacattaagggcaaaacagagatttcaggtggagggctttaaatactccaaccaccagcattcaatgcacgtttttggagggagaaaaacacaaacttagggtttttagagcttgggttttcttagctagggattaagggagttgaaggcacaagtggagttgcatctccatcttcttcttctttccttcagctgggtatgcctctttttgtatctcagccacccattatgaggtttggctaagctttcattgtagttagggcactagcacttgatgtaaatttcattgggatgtattgaatgctattattcatttatcaaaagctattttactgcacttgctttaattctttcatctcttccttggacttggccattctttgtgagagtttggagctagggttcacaataggaatattagggctttagtttggaactaagtgtagtaacttgctaacattacctaggaatagggatgggtgcttgtagcttgctcatttatgtgttcacttaatgcttaacttactgaagattactaagggattagaattggagtgtgagttaaagaactaagtacatgaggaatcaaggcttagtcaacttcagaaacgcattagctaaatagcttagataagtgaagatagtaaacaatacatttccattgagaggagcatcatgtgtgggttgccctagccacatctcttgcatattattatccctacaattacttgtcgatattagtttacttgtttacacttagcttttaatttaattggtacacacacagcaatacacaaacattattcttatttattacgtatccaacttatcgattaaaattatagtctatttggtcaaacaatcctcgttgggaacgacaaatcccttttcttatcactctattacttgtacgatcggtatacttgtcgagttcgcaacaatagcatatgccatgacaaaaaaaaaaaaaattgttcagcccacatgcaaataacgtgtactgattttttgagtggggagaaagcaactgcagtagacaagggaaaacattcttcttctttacccaaaattgtaaccttttttgtattttaatatttcctataccttttgcatttatttaatttttttacttatttttatccattttttgaggcgtatatttgaaatgatactttagattagttgtaaagctaagcaaattgccttgttagattcttcggaatgtcattcttttcaccttccgagaagccagaaggggtcctttattcctttgttaaaattactgcttccaagtattccatactaacaaaattcttttcccactaggtgggggtggaatatatggacaaaaattaaaaagccacaatgtcttattataattcatgccataacactaatcattcaaatataattaatatagtttttcttggtctctccctatctctaactaatgcgactaccctccatttgatcctgatgtacttcctttattcggattctatagcttttctccacacatatgtggaaaatagacactaattaaggtcttctgtggccgaccttgtgttgttacattagccttgaccccattgtacatttctctgattgctcgaatatagacaatatatataccgtacctttctatctccacaggaccacaaccttgcgtaatatagtacatgcatatctttattataacttaagctatataaaaagtgttggcttaaatctcaaagtcaagttcatcccaataaaaaaatattagggtttattcttttgataggtcaatagttaatttaaaaacacaaaagagagaaaaaagagaagagaaagagagcatccaaaattcgcatgttgagaatgacagaaattgtcatccttcaatcttcttgatttccttgtttaatcgttagatcttattgaaacttttacagtaagtttattactcaccagtattaacatcttagatagaggcttgtatcatcaccggaaattcccaaaccgaactggttctgaatccgttttctgaagcaagcaacggtattgcgaaggacatttctctcatactaatcgttggatcgcgttcaaactttgaggaatggttaataaaatctgtttctacattctgactgttcggatcattcattgaagtattttcaagagggagtgtttcaactgcaaacagagattatcagaattcttgctctgttctgtcttgtttcagacagtgatattgagaaagagttatctctttacttaaccgttggattattctcaaatttggtcagtgtgttcctctcttgtagtaattcaatttgaccgttgggatttgtgagttgttaatgctggtggtagaaattaatttcgtacagaaacctattttgtatgtttgtctcttgtaatgttttggtataacttttgttgaagttgcttgttgattataatggttgctggaactcttttgtaatctcactttattgatagtgaaaaatttgagtggactccgaaatcgatcccatataaaaaggaggctgcaacgaaagccacaaccatagcagcaatggagataataagtaacgcacgcccaaaagtcaagctggaatgtagtgatttcactaatctttcaattatcacttaataactagagcaaattacaacaacactttatgaggtttagtaaggttcgaggaaatgttaatataatgtttttaatataagagatgttaatgtaattttcaaacttataagaagttagtgtaggaaaataaaaaataaaattatatataattacacgaaactaaggagaattattgtaatttgctctaataactatacgtattaaatttgtaagaaatacaatttcaaagttaagatattttaaaaataaatcctacgggtgatatttgttgttacaaatgcacttgcataatttttaattaaaattttctatatatctatacatagcctgtttaactattatgataaagacaatggataacaaattttaagaaattgttacaataatcaacaaatactacatacaatgatttctatttataattaaaacttgttacttttaaagatttaaaatcagtctagtaaacaaaagcctaaaatttgtggaattttaaatttttaaaataagatagctagaactgatcgctcccatgcgagtgaataaagaatggctgaataagaaaaactaagcaaattatttgaccttgaatcatgcgagctctgtttgcatttgaatgcttgctcttaaactggacaattcttcgaattcaactcgtggaagaggcgcagccaagtgtatagaatgttgttaccatcattttccactgctcgtatatgctagatgctcttttaatccccgtggtatactattaaatattcttttttgtcgaaataccacaaccaagtgcagcaggttccctccatttatggggtcctttattgccactaattcactattcatgtcaataagcatcttcacaacctcaacatttcctgattttattgcatgaaacagcactggcgaagcataatcagttatcaactccattagaatcgaattacatttcaattcgttaacttgagtcaatatataatttttcaaatagccgaccagcgtctgattcctgtagtagtcctccatgattagtaagaggtatatatatagttgattggtccaaccaatgtttaacataaatgaaacaaacaaaagtcaaatttaaattttattcttatatatatgaagcaccattttttatctctattcaaaaaattatatattttaatccgtacattaaaaaaattgtaagatatttttgcacatgtgactcatgtgttggcaaacattaatttgtgttattagaataactcaacaaacatctaataccattattacactggatattgataattcagaactagttctttatttttttatataaaacaaaaatatatataactttctaaaaataagaatcaaaatgaaaatgatgtcaaataagatccaaattttagcttagcacacacaaaaaaaaaaaaagccattttcaacttgtgagcttacctaaaatttctggaggcttttgcgccagcatatgcaatgctgtaaggttctcttcatttcttgcaatggccagagtagttggatgttttttcaaataatagcattgccaaatctgttatatgcacaaattaaatagtgcaaggcaaggtaattaaaaatttaaaactccaactaaattgaaaaaccacgtacgagttcatatatatctccttttatatatatgaaatcaatgagaatttagctgggacctgtttggttttaaaggatgatatcacagtctttcagaaacctaatagtcataattaattatttcaacattttgaattatggtcaattgtaccgaatgacgttggaattgtaattagcttatggtatctgatcggttcaatgggttcgattcagtttgtaaaacatcataatatgtaaaaaagaactagattaaaaaaaggagaaataaggttgtttaattagttttacacttaccaaacatgttgattctaatggtcattaaaaaaatttacttcagtcaatagggaaactcgctagtggcttgtgaatgcaagtacgtctaaatgtctaatagtctgtgaggctaggccccacttcaacttaaagcttactacacaaaggaacaaaactgtctggttttctgaaaacttttgctgaaaactatagaattggcattaaagaacctgccagctgtttaatattaaatattatctgaattatggaactttgtttttttcttttttttttttcatgatttgcacagccagagcctggacataacagtggcagaggaaggggtaggggcagaggtaggggttgtggccgtggaattagaactgcagatcaaaagatgagttcacatgccaagtgtgaagatgattctgatgtattgaagcagaatgacaaccacactcaaagcaatgaaagcatggaaaatgtgccggaacctgaagaagttaagcaaagttttccagcaagcaaaccggctgaagtgtccattcgaaattttgacttaaatttgaacccagatgaggatatggattcattagacacaccaacttcggtcccaactagttcatctgcaaaatcagtgtcagaagagaagcatgaggaataccctggatggtccttgtctgaaatggaaaaaatgaccattgatccgattcaactagcgaacataaatggaaggattgatgaagatgaagaggattatgatgaagaaatgtagaagaacctgtgttggtttattcattacttctcatataggcccgtcattagaatgtttttatggggaattagagtagattttgtaggagcagtgttagatagatacttactccttagtagtttaggaagattaggagggatagggcattgaatactctccttataacccttgttttaggttaaaagtggagatatagattgttccaattagaaatagccatttgccagtatagttatgacttacgagaaattttaatctcatgtaggtattgcttatggtaggcactacattcagattttgggtgtgttattgctctaaatttcacggggatgcctatcttaatcacacttgtatctagcggaactaacttactgctccagcaacatgatttgcatgcaaccttttgaatttttgttatcgtgaacttattgcacgatgagaagaggaaaagaacaagacgttagacggatagaaataaatatgaaataaagtaaaaaagatttgtaatttagatgaataaaaataaaaagcaaaaaagtgtagaaattcattatttatgtttgttttggacaatgaaagagaaaatacaaacagatgaattgtttggaaaaattatacgttttttaaaaattatttccattattttctaataagattattatataatatacttatttgatttttaatatgatggatcacagagtatcctgcaactaaaatagagttgagacgaaccagagtctcaagacactgttaatcacacaattagccaggtaagtgtatcgtgggagtctctccgtgctatgcaacggtgactaattaaataaccacacactttcctagacaccaacggtgtaattaactttatcttgattccaccggtaaggtaagcaaaaatacaccaattgaagtgacacacaagatttacgtggaaaacccaatttgggaaaaaccacgggcaagaccaggaaagattttcactaaaagaagaaagattacagcctctctaattttaaggagaaaacaatatcactctctcttaaaataggagattactctctcacttattctagctattgaagaacacttggtatttctcaagtgtgggatgcagctgctgctgctgcacaccggtaatgaatgcaaagcgctcctttatataggagttgcaaaacgcgtgtgcacagtaacaaaataataaaataacgtgtgtgcacagtaacaaaataataaaataataaaatttgttactgtgcgctttcggtgcgtttgaaaaattaaaatttactgtgcactctactgtgcactttactgtgcactgctttcggtgcgctgttttttcaacaaatctcccacttggagatctgattgagaatcaatcaatctccacacagttctttctatcttgccagttccatgctgtttatgtctccgataggccatacgaggatcgacaccatatgaacttgtcagcattgattggttttgtcatgacatctgctaggttatctttggtgtgtatcttctgcatgtctacacaaccttcctctactacttctctgacaaagtggtattgaactcctatgtgcttcgttctggaatgaaaggctggattccttgcaatgtgcaaggcactctgactatcacaatacacaataactgattgttgtttgtgtccaagttcttccaataacctttgaatccaaattgccactttgcaagcctgagtagctgccatgtattcagcttctgtagtagacaaagccaccacagtctgtaactttgataaccagcttactgctcctcctgcaagagtaaacacatagcctgtagtagatttccttttatcaagatcacctgcaaaatctgaatcaacatatcctctgacagtaaactccgatcctccataacataatgcagcatctgaggttcccttgatgtatctcaagatcctcttaacagcatttcaatgctctctaccaggatttgtcatgaatcgactgaccataccaactgcttgagcaatatccggtctcgtacaaatcattgcatacatgaggcttcccactgctgatgcatacggtactcgagacatttccatcctctccgcttcattgctaggacacatacttgaggataatttataattgacaggaagtggggtagaaattgacttacaatcttgcatattgaagcaccgcaagattttcctcagataattcttctgactaagccaaatcttcctatcttttatgtctcggtaaatttgcatccctaaaatcttgtttgctggtcccaaatccttcatatcaaattccctagccagttgtgccttcaactcttggatccgatctttgttggggcctaccaccaacatgtcatccacgtacaatagtaaaatgatgtaatcattatcaccaaacctcttgtaataagtacaagggtctgaattgagtctattgtacccgaggcaaactatgaaggaatcaaatctcttgtaccaacatctcggcgcctgctttaaaccgtacagagatttggtcaacctgcaaaccaagttttctttgcctttttcctcaaatccttctggttggagcatgtagatttcttcttcaagttctccatgaagaaaggcagtttttacatctagctgctcaagatgtaaactgaatgcagcacacatagcgagaactactctgatagtggtaagtctaacaactggagaaaatatctcattgaaatcaataccttccttttgagcatatcctttaaccaccagtcttgcacgatatcgctccacctgatcgttgccgtctcgtttgatcttatagaccaatttgttatcaatggcttttcgaccttctggaagagcaacaagttcccatgtcttatttctatgtagagcttccatttcttcctgcattgctgccatccacaaagaagcatctggattactcatagctttatggaatgttgatggttctccttcttctgtaagaaggcagtatgcatcatggcttgccataacatagtctgagtgccacgatggttctcttgttcgtcgcactgatcgtcgaacttctgcatcctcggcctcagttggttcttgttcctcgtgctctggttcagcttcataggaattatcttctccgttgttcccatctatctctatagtagtaacttccttcgaagtgctgtcatcttcttgttccctttgcagttcattttctgcaaatagtacatctctgctgaccacaaccttgcgggcagtgggatcccacaggcgataccccttaactccgtcagcatatcccaagaatatacatttcctggatttcggatccagcttggttctttcttgggagttgtacattacatatgcgggacatccgaacacatacaaagaagaataatttggtgccttaccatgccacatctccattggtgtcttcaacccaatagccgttgatggcgatcggtttatcacgtaacagacggtctttactgcttctgcccagaatgacttggctaaactagcagttctcaacatagctcttgttctttccaacagagtcctgttcatccgctctgctacaccattttgttgaggggtgtatgcagttgtgaattgccttttaataccctctcgcttgcaaaatgaaagaaattcaccatctatatattctcctccgttgtctgtcctcaaacacttgatctttctcccagattcaagttctacttctgctttgaagtctttgaaagtttggaacacatctgacttcttcttgattgggtacacccataatctcctggagtagtcatcaatgaatgaaacaaaatactttgctcctcctagggacatttctggtgactcccacacatcagaatgaatcaagtctaatatgtgttcgctcctagcagttgatgtggcaaacttcaatctactctgcttactggtaacacagtgctcacagaaaggtaggtttaccgacttgagcccctgaagaagattacgctccgcaagaatcttcaagcctcgttctgacatgtggcttagtttgagatgccacatcattgttagttcttcttgactggctgaagcaacaaatgcatctccttcttgtagcgtatctgccataagcatgtagaggtttgatgctatcttctctgccttcatcaccactagagcacctttcacaacctttaagatccctccttcaataagcgtcttgcacccgagatcatctaattgtccaatcgacattagattcttcttcaaacccttcacatgtcgtaccccttgaattgtgtgaacaataccatcatacatttttatcttgatggtaccaactccggcaatctctaaggcatgattattccccatgtacacagatccttcagagacaggcttgtaggtgcaaaaccagtctcgtcgtggagtcatgtgccacgttgctcctgaatctactatccaaacatcagtgagctccttttcgcctttagaactgattgctacttcgctgaataaaatatctccttcactagaggtactagcaacacatccttgagaagtacttgcttcattagacttctctgtactcttcttattactccaacaatctttcttgaagtgccctttcttgccacattggtagcattttacattcttccttcttcttgactttgatctactctgatattgactcccactcgagccacgttccattgatcttcctctcgtcatcattaaagcttctgcttgctttgaactctccaatctgtcatccttattcttacatcttgattcttcttcaagaattgccgcagcagtatcattgaatgacagattgtctgagaaacctttatttgtgatgttgatgatgagttgatcatatgaattaggtagactttgaagtagaatctcggcacgttcactttgttgatgtggtccgtcaccaaagtagactcactcattcgaagagtatagagtttcctcttcaagaatattttattgtgaagtgatttaacctcgtacaatttggtgagcacatcccaaatttcttttgccgtcttcttttcagcaacacttgacaacactgaatccgccaatgctaggtgcaaattggcaacagcattgttatccatttctttccattttgcttctgtcacttctgcaggtctgccttcaatggcagctatgcaattatccttcctcataattgcctttatcttcagcttccacagggagaaattactcccgttgaacttctcaatctcaaattttgctgccatgatattgacgatactctgaataatgattgcgccgggtcacactatttttctgtgaatagtgtcgtatacgtgaatagtaccgtatgtatatgtgaatagtgacgaacagtactccgtaaacagttccgcccaaatatgcaaccagtatgctctgataccactgatggatcacagagtatcctgcaactaaaatagagttgagacgaaccagagtctcaagacactgttaatcacacaattagccaggtaagtgtatcgtgggagtctctccgtgctatgcaacggtgactaattaaataaccacacactttcctagacaccaatggtgtaattaactttatcttgattccaccggtaaggtaagcaaaaatacaccaattgaagtgacacacaagatttacgtggaaaacccaatttgggaaaaaccacgggcaagaccaggaaagattttcactaaaagaagaaagattacagcctctctaattttaaggagaaaacaatatcactctctcttaaaataggagattactctctcacttattctagctattgaagaacacttggtatttctcaagtgtgggatgcagctgctgctgctgcacaccggtaatgaatgcaaagcgctcctttatataggagttacaaaacgcgtgtgcacagtaacaaaataataaaataacgcgtgtgcacagtaacaaaataataaaataataaaatttgttactgtgcgctttcggtgcgtttgaaaaattaaaatttactgtacactctactgtgcactttactgtgcactgctttcggtgcgttgttttttcaacataatacaccactaatggcttctttgtaaaaccaatctcgcatcaacctagtttgtttaaacttaaaataagtaattttaaaataaatattttttgaataagcacttaaacaaataacgttgatcaaaataaacaaaaaaaaaaaatctgttttttaaacataaacacaatttaaacaaatatattaaaaaacagaaaattgtttattttattaaaataaatattttttcaacaaataaatttaaacaaatttaacaaaagaacatcacttgagttacgagcgtgagttgggctattttgacacatatcagacagttataaataatgatttggataattaactatccaatgtgggacttgtgcctaccatgaggtgaacgttatctaaggtggaatataaagaatgtttttatggttttgaatctacttggaatactaataagaaagacgtgaaaataaaattccaaagtacagttaacatgatactagggctagatacacatgcttacatgcatccgtccctggagatatatgaagtttatatttaatatggataagtcctaggaaatacagaatagtcgggggtcaatctaaaagtttgaaataattataatttcttattaaaatgtcgatctaaatggttcttaacatatataataagagtggttgtgacatatacttgaagtttgagtttgccactgtctataactatggcaagtgttcggatggaagataaaatctagaccacaagtgtttgtcaaaaaagttaaatggaaagagaagaaacagaagtattggaaaaatctccattgaagccactgcataaaaaacccacttggaagtgtgatcaaatatcagcaatggagataaaaaaaaagtaacacaggctacagtaaacttgctttctgcaaatcttgatgaaatgaaatttgacaagaatgagagtatagacgcagaagaagtcaataatgtgactacatttgtcaatacgctcattggtttggatcaattaatgtcaatgcataacttgattaatcttttaattatcacttaataactattacaagttaattttttaagttaagatattaaaaataaaaagaattgacctagcttgaaccatgcaagctccctttgcatttgaatggttgctctaaaactggacaatgctttgaattcaagtggcagatgagcagcgaagtgtagaacgttgttatcttcattgtccactgctctactatatgctctatctttttttcaagtataaaaaaaaaaagcttatatttcgatatagggcagccaagtgcagtaggttccgtccattgttggggtcccttatcatggtcactagtttactattatcgtcaagaatccaacgaagagcctcatcatttcgatatatagtggattggtccaacaaatgtataacatgagcataaagaaacaagtaaaattaaagtttggtcttatatgaaacatcaattttttgacacacataataattaaataaataaataaaacaccattcgcaaccgatcatgaaagcttacttagaatttctgaaggctttcgccccagctatgcaatgctgttaacttctctttttgccccttcatctcttgcaatggccaaatcaattggatatttttcaaataatttcattgccacatctgttacatgcacaaattaaatagcgatggtggattgcatatgtacaaggctaggtaaatctccaactaaattcaaaaaccacgtacgagttcaactagataaaaaaaaaaaaaaaaaaggatgtttggttttacacttaccaaacatgttgctgctaatggtcataaaaagcagtcgatcgttgaatatccttataagccattttgtgaagcagattctgaaaggacaaaatttgcaccattttgttggacatggccatataatacagccaagcgaactggaagcatcccatctgagtttggtatcagcctagaacgattggatctgcaattctaatgataatgtgctcagtctcattaaatttccctcttttgccttctatttttcacatgcacaaacatgattagacgtataaatgacatctacagaagaaaattaaatgttggaatggtcttacttttggaacatgtgttgtttgttctattgtttaccttcactttctagtttctaaatcacatctatatatgcactaacaatataaaatgattttatataaattatcattttaaaaatcaataaatttattatattacactcttaatacataactcttatttataaataaacaaaaagatgaaaatgatgtattattttgatgaatagaaataaaaagaaaaaaaatataaattttaatttgtttgaataaataagagggtagaaaacaaaaatatgttcattgcaaaaatgttcatacaaataaaaaatcaaatttaatttgaaaaatccgacctttttatttcattatctctcaacttaaaaatactttgttataaaaagataattttattttttaaaatttaaacataagtaaaagaacacggctaaccatttctccctccatttcacgtctcttagtgaaaaatatggtttggttaggactcattaattataatttcatttctcattttctaacacattcaatcaagaatatattttattacattatttctcttcattttaattttatatttattataattttgttgtatatagtaattcttgtcaaatcgagtaagattaagtctcactgaaagatgaatgtataataaaaaaaaaaaaagctttttttgtgttatgatttgctcccttcaccaaccacatgcatggaaggaaggggaaatgctttgacgtgggttatgcagtgtagtctcaaattaaggcgggaacaataagaaaggtaatatttcatgacatagaaaatgtagaataatctcaaatttaatacatgacatagaaaatgttccacatacgaataataatacagtgccttaaagttatgccaatgtctgtaactctgtaataagatagtccagttaggacaaacgataatatctggaccacaagtgtttgtcgaaaaagttaaattgaaagagaagaaacagaagtattgggaaaacccccattgaagccactgcataagaaacccacttggaagtgtgatcaaatatcaaaaaggaggctgcagtgaaagccacaaccatagcagcaacggagataataagtaaccaacgtccaaaagtcaagctgggatgtagtgatatcacaaattcgctttgtgcgaatcttgatgaagtgaaatttgacaagaatgagagtaaaaacgtagaagaagcgaataatgcgactgcatttgtcaatatgaagacgggaaaccacgcattggtcttggcacctggaacagtcagagcagccgcaaatgctacggtagcaacaagtgttgacacaagcatgccagattcggctattcctttggctgtatccttaatttcttcggataacttcttgtgttcttcacaaaatacatcaattggtgtcttgcccatgatgtttctcattgttcttagttcacccggaacattcgactcctcgaactatttacaaatcaggagtatatgtaaatgatggtatccaaatgcataacttaattaatctttcaattatcacttaattaataactagagcaaattacagcaatgcctcctaaattcagtgtagttactatacacaaatatattctcagatataagcttaaaatttgaagaaatgttagcttaatattttcaaacttataagaaatgttagtgtaatttttcaaacttaaaaggaattagtataagaaaaaaaaaatggaattacatataactacacgtaactcgaggagaattattgtaatttgttctaataactattagatattaaatttgtaagaaatacaatttcgaagttaagataattttaaaataaatcttacaggtgatatttattgttacaaatgcacgtgtataatttttaattaaaattttctatccatatattggctgtttaactattatgctaaagacaatggataacaaattttaaaaaattattacaataatcaacaaatgctacatataatgatttctatttttaattaaaacttgttacttttaaagctttaaaatcagtctagttaacaaaagcctaaaatttgtggaattgttaaattaagattgctagaactgatcgatcccatgcgagtgaataaagaattgttgaacaagagaaactaagcaaattaattgaccttgaaccatccgagctctctttgcatttgaatgcttgctcttatactggacaattcttcgaattcaactcgtggaagatgcgcagccaagtgtagaatgttgttaccttcattgtccacttctcgtactttatgctcttttaatgtcttccctgttatactgttaaatattcctttttgtcgaaatagcacaaccaagtgcattaggttccgcgcgtccatttttggggtcctcaaattcacgattcatgtcaatcatcatcttcagaacctcaacacatcctgattttactgcatgaaacagcactggcgaatcattataaggtatcaaatcctttaaaatcccatagcgatggtggattgcatatgtacaaggcaaggtaaaactctaactaaattgaaaaaccacgtgcgagttcaactagataaaaaaaaggatgtttagttttacacttaccaaacatgttgctgctaatggtcataaaaaatagtcgttgaatatccttataaaccattttgtgaaacagattctgagaggacaaaatttgcaccattttgttgtggccatataaaacagccaagcgaactggaagcatcccatctgagtttggtatcagcctagaaccattggatctgaaaattctaatgataatgtgctcagtctcattaaatttccctcttttgccttctatttttcacatgcacaaacatgattatacgtgtaaatgacatctacagaagaaaattaaatgttgggatggtcttacttttggaacatatgttgtttgttctggtgtttaccttcactttctagtttctaaaatgtctgagttacttgcatccttgcctttgtagaaaacagtgagtgcagacttttaatgtctttgattttctaaaagatgttgtcagcagggtttctgatttaggtggttctgttgcaactcgtgatgacatactgtttctaggaggtttgtgctctgattaatactcatgttacttggaacaagttttctgtgtggtgaattttgtttattttatattaggaaagatgatgataatgacagccacgaggagcccaagagaaataacaaggtaatatatcaattacttctcagtagttagcttaaatttttcttgtgtgattaaaccttctgctgagtaattatctcttgtctatgcagactgtgaatcttttgctggttacaaaagaattcacttcagtcattagggaaattcacaagttgcttcactgacttgccaatacagttgggaatgttctttatacaaaagttattgggcttaaatgtataataagggttcaagaaacctaggtttaggttttttaatctcctatataataatcatatttgctctagaaaaatatatgaattgtcatcatctacctgaataacatttatcattcgtaattcgtagttgattgaggaggctaagagaggacttaccaaagacaaagcaagaatgatcttataacattcatgtgtactaggtccaatacgttttctcatattctatgtaatccttcaaattcaagtacatttaatagtctataaaccttattatacaaagaaccaaaactatctgattttcttaaaacttttggtgaaaactgttgttgtaattgagcaaactatgcactatagaatcagcactagcacataatgtggaaaatctagctgagagatgcaacattctaaagaacctcgcagcagcttgatgttaaatattatctgaataatgaattttttttttttttcatgatttacacagagcctggacattgcagtggcagcggaagggggtatcaatgtcagaagagaagcatgaggaataccctgaatggtccttgtctgatatggaaaaaatgaagattgatcccattcaactagctaattaacttaaatggaaggattgatgaacatgaagaagattatgatgaagaaatgtagatgaacctgttttggattataaagttctaattgagaattagagtagtagtattagacaaatccttagtcgttaggaagattaggagggacaggacattgaaaactttagtccttacaaacttttaggataaagtggagatatagattgttccaattagaaatagccacggtattgttatttgagaaattttaatataggttataataggcactacattcagatccttaaacttacggattttgattttgttttagctttgattgtggcgttgtgtatgtaagtcttttattgtatcatataacgtatcctctcgagtacaatttgagagcaaatctgcggagcaaactcactgatccgacgacatgatttgcacttgaaccttttgttatcttgcatttgatgagaaatcagataaatgaaaaaaaaaagggatagaaataaaaatttaatgtatatgcactaataatataaaataattttaggattttacaaattatcatctaatcataaattattattttaaaaatcaataaatttattatacagagtaaattgtgattggatgacggtataaattttttacaatctcattgcataactctgctaaaaaaaaatatacaaaataatatgaaaataatgtattatttcgatgaatagaaataacaagaaaaaatgtaaatttttatttgtttgaataaataagagagtagaaaacaaaaaatatggtcattgcaaaactgttcatacaaataaaaaatcaaatttaatttgaaaaaactgaacttttaatttcattatttctcaacataaaaatattttattataaaacaataatttgattttttaaaatttaaacataagtaaaagaacactcctaaccatttctccctccatttcacgtctcttagtgagaaatatggttaggactcataatttcatttctcattttctaacacattcaatcaagaatattttttttatctctttatttctcttcattttaattttatatttattataattttgttgtatatagtaattcttttcaaatggagtaggattaagtctcagtgaaagatgaatgtgtaataaaaaaagctttttctgtgttatgatttgatcccttcaccaaccacatggaaggaagaggaaaagctttgacgtgggttatgcagtatagtctcaaattaaagcgggaacaataatctcaaatttaaacacaagcttgattgttccacaaacaaataataatacagtgccttaaagttatgccaatgtctctaattctgtaataagtttgtcctgtttggacaaacgataatatctagaccacaagagtttgtcgaaaaagttaaattgaaagagaagaaacaaaagtattgggaaaacccccattgaagccactgcataagaaacccacttggaagtgtgttcaaatatcaaaaaggaggctgcagtgaaagccacaaccatagcagcaacggagataataagtaaccaacgcccaatagtcaagctgggatgtagtgatttcacaaattggctttgtgcgaatcttgatgaagtgaaatttgacaagaatgagagtaaagacgcagaagaagtgaataatgcgactgcatttgtcaatatgaagacagtaaaccaggcattggtcttatcacctggaacagtcagagcagccgcaaatgctactgtagcaacaagtgttgacacaagcatgccagattcggctattcctttggctgcatccttaatttcatcggataacttcttgtgttcatcataaaatacatcaattggtctcatgcccgcgttgtttctcattgttcttagttcaataggaactcttgactccacgaactatttacaaatcaagagtatatgtaaatgatggtatccaaatgcataacttaattaatctttcaattatcactaaataacttgagcaaattacagcaacacctcctaagatctagtgtaattacacaaacatttcctgaagtattagagtaaggtttgaggggatgttactctaatgatttcaaacatataaagaatgtaagtgtaatttttcaaaataaaaaattgttacaatatcaacaaatactacatacaatgatttttatttttaattaaaacttgtcaatttttaaagatttaaaatcagtctagttaacaaaatcctaaaatttgtggaattttaagtttttaaaataagattgctagaactgatcgatcccatgccagtgaataaagaatggttgaataagaaaaattaagcaaattaattgaccttgaaccatgtgatatctgtttgcatttgaatgcttgctcttaaactggacaattcttcgaattcaccttgtggaagacgcgcaaccaagtgtagaatgttgttacctccatagtccactgctcgttctgattgctcttttaatcccggtggtataatattaaatattcttttttgtcgacatagcacaaccaagtgcagtaggttccatccatttctgcggtccctataagccactaatccaggattatcgtgaagaagcctctccacatcccaaaaatttcctgattttattgcatattcacgattctgttccaatgtttcaactttagtcaatacttctctaaatagccgatcacaaacgtctgattccttggcaaacattaatttgtgttattcgaataactcaacaaacatcaaataccattattacactcgatatagataattaaggactaatacttaattttttatataaaacaaaaatatatataactttctaaaatcaaaatcaaaatggaaatgatgtcaaataagatctaaattttagcttagaacacacaaaaaaaaaaaaataaaaagccattttcaacttgtgaaaggttacctgacattccgctaggcttttcctccagcatcttcactgctgtaacgtcctcttcatttcttgcaatggccagagcagttcgatgtttttcaaataatcgccatgccaaatctgttatatgcacaaattaaatagtacaaggcaaggtaaataaaaactccaactaaattgaaaaaccacgtacgagttcattatatctccttttatatatatgaaattaatgagaatttagctaggacctgtttggttttaaaggatgcatgatatcagtctttcagaaacctaatagtcataattaattatttcaactgattccatgggttcgattcagtttgtaaaacttcataatatgtgaaagagaactagattacaaaaaggagaaataaggttgtttaattagttttacacttaccaaacacgtcgaacctaatggtcatcataaacagtcgttcaatatccttgaaatccattttgtcaagcactttttgagaggacaaaatgtccaccattctgttggaacgatttaaagcagccaagtgaactggaagcatcccatctgagtttggtattagcatgtcttctggcctcatacgcttaaccaactctttcacaatttcaagactgccttgacttgttactgctacatgaagagctgtgtctccactatcatttaacggcatgcgtaccatatcaggacatttttcaataatcaattttgatttgagccactcattcaaccgtatatctctcgacagatcttcttttaaagaacctgcaatcctttcaaacttcacattataatttctcgtttaccctaaatctgtaaaaattctcttggaaacttgtctcaaatttagaattcctaataatttcatcatttgtaaattgaaatctagctgagaaattcgagattctgtagtagtcgaagggatccaatcatcaatcacctttaattaagtttgaaatttgaatttcaatttgtgtttgaaaattaattctatgatgataagtaaaattgtttttgagagaagtaatttattttttattttcttcagttgacaaaagctaattgatcttaacatgtgacttatttatactcactttaaaagtgattctactttttttatctttcgaataaaaaaaataattttctaaacctattgttgaaatatcattcgtataataatagtataaatatattttttttaacgtcaagtggttgcaaattcaattttttttttttcaaaatgtaaaataaacaaactcttaagacatgatctctgaaatgcaccctcttgtgaatgcaatagtttcaagtataaacttactcagctcttctggagtcatttgattcactcctctactttcatgttttggtgccggcgagtttgttgaagtggcaattggagtttgctcatgactttgattaatctgaattatgtggtcatctgaaacttcgctattggagttcatgatttaattctagggaaaatgaagtgatttggagacctctatgaaattccctgtgtctataagtgttgcttctttctttccagcctgcgaagcttgaacatattatatatggtggtaaaacaacagcccttaaatagttttacttttccaacttacacttaaaataattatttcctatatgacattttgtggattacaattacagcaatgttcaatctgttcaacacctcaaccctacagttttcaaaagctttttaagttgaatgatttctaaatttataatattaattcttttttaaagtaaataaatatattcattaaatttgttaacagaaaacaatatatccattataaaaaaattatattcattaaattgtggggattagcgagactcaggtatcatgaccttgttaattaacttactctcaatttaatattatctttcattgttggacaatgatatgatatctttacacacataaaaagtaaactacacaaactatccctaaagttttgtgaaattatataaactacacctaaaaattatattcattaaattgtggggattagcgagactcgctatcatgacactatgttaattaacttactctcaatttaaaattatctttcttcgttgtacaatgatatgatatctttacacacctaaaaccttcaatttcctactcttatattgttgacgaaaactttctgccatggcggtggttatatatttatccaacggagttgacgcatttaattatatgattatatcctaactctggtctttttatactagttataatcaattactccaacaaccattgaactcaaagctaagaccagatgcattttattatcggaatatgtataaatttattaaactcactccaacaaccattgaattcaaagcaagactaaaagttacccacattttgattgttatgttggtaattgttgttatgatatttttttatgtatgttttttttttattaatgataacatacaaaaggtaacggattgatgatatataataggagtatgatttggggttggtataaactgaattatgtggtcatctgaaacttcgatattggagttcatgatttcattctatggaaaatgaagtgaattggatatctctatgaaattccctgttcgatcagtgttgcttctttctttccagcctgcgaagcttgaagatattatatatggtggtaaaacaagatcccttaattagttttccaatttgcacttaaaataattattcccaatatgacattttgtggattacagcaatgttcaatctgttcaacacctcaaccctaaagttttcaaaagctttttttaagttgaatgatttctaattttataatattaattcttttttaaagtgaataaatatattcattaaatttgttaacagaaattatgtgcattagcgagattcgctatcatgacactgttaattaacttactcataatttaattaatattatcttccttccttagaatatctttaggctaagatcttaagcaaagattttgagtttaagatctgatcttcattggatctacatcatagaggatgagttcttgtggaagatctcttaagacctacacaatgttcaaaaaataataaattttcttcattttttctctctctttaagatctcaaaatgagatctaccattaaataaaaaaatgaaacagannnnnnnnnnnnnnnntgcacagtgttaaaaaaaagaatagttttttttttcgtctctctcccctaatatctcaaaatgagatctatcactaaagaaaaaaatggaagagatattgaaagattttcaatcttatgtgacattatggaatctactaaaaagtggtctaagatcccaatttgggatcttccactaaagatgagcaatgatattgagcttaagacctagttttcactagattttccaataaaggaggtgaacagaactccaatatgaaaaatgaatttttgtagaagaatccttaagatctacacaatgttcaaaaaaaataatatttccactaaaaaaaatggaagaaatcttcaatcttacttaacattatatagtctactaagaagtgatctaagattccaatttgggatctaccactaaagatgtaagcatctttagtgctagatcttaagcaaagatcttaaacttaagatatgatcttcactagatcttctaataaaagaggtgaacaaatctctaagtatgaagaatgagttcttgtgaaaaaaccctgaatatctgcacaatattcaaaaaagaataattttttatcatcttttttcccctaagattttaaaatgagatctattaagaaaaaaaatgaagagattttcataaatatttaatcatatgtgatattataggtctaccaaaaagcgacctaagagcatatttaatggtagatcctaaattgtgatctttagaccactttttagtagatcctatagtgtcatgtaggattaaaaatctcttatattttttattcttttttaatattgtgcatattttaagaattcttctatgataatttattatttatattaaagatctgtttaccttctttattagaagagctagtaaaggtcagatttttaactcaaaattcttattcaggatatttcaactaaaaatctaatattaaaatgcttattattgacgaaaattttctgccatagctgtggttatatatttatctaccttccgttgtcgcatttaattcttggattatatcctaagtctggtctttttatactagttatagtcaattatgccaacaaccattgaattacaagatgcattttattatcggaaaatgtatgaattttattaaacccactacaacaaccattgaattcaacgcaagactagaaaaaaaaaaatacttatttaatattttggtgaaatttattcagccagtcatatcagggccggtcctgaaaattctttggcccagggcgaagtgaaaaaaatggacccctaatatataaattttttaaaatacaaataatattaaaactaagagatggaaaaaatgggcccctaacacacaatttttttgaaataaatataatattaaaactaagggatgaaaaaaatgggcccctaacacaatttttttgaaatacaaataatattaaaactaagggatgaaaaaaattggcccctaacatacaatttttttgaaatacaaataatattaaaactaaggaatggaaaaaatggatccctaacacacaaaatgagcccctaatatatgttttatttttattatttttattatttttttatttaagctaccgataaaaaaattttgggccctgggcgggcgccccgctcgccctgccccagggccgggcctgagtcatattaatagttatttttgacattttaatccttttatgttacgtaatataaattcttttattaataagaataaacaaaaattaataaataaatagatttgtcacatttttttctttcaataatttaaattttcttatttaaaaaataaatttattaatgatctatatatttaaaaacaaaataattatttattctaacatattttataatgtttagaaacacgtaggctatgatggaagaggataaacggtttctcatcttaagaaagtattttatgaccatcagattatttattttaaaaatcaatgatagtaaatttttctttttttattaatttttttctttttttttgtcctctttcccatactacccttttcctctttcttcttctcttctttcccattcttcctctcttcgtcttagcggcaacagtggtgccatgacggccggtgatagtggggatgttaatgcgttgttgcttggtcgttgtgcggagtaaactagagagtgtctttcgccgtttttcttgcggtgttctgcaacaagatttcaaccggagaaaaagcatggaagacgaaacagtcacaaagcttgatataactattgcctcacttaaacccaaattggattcaattgaccagtgttctgctcggtgagaacagagatgtccaacaatggagttgggcaaattaatgtaggatcaaactctctctctctcaagaagcttatggagacgaagccacttgaggaagaagatcaccgcacgatgaacacgacactttggggggtgcggtgtgtgcaggtgtgaaggaaaagagagagttagaattgtgtgtacctttcaccatgaattgccgatatttataggatacctggagtttgttcatcaaacggttgcgcacgattcctatatatgtggagacactggctcgtgggggataacggccacccccatatttcagggtggttatcgcgggctaacagaggttgtttgactgtttcaaacaagataatacgtttccgtaacagatgcccctcagcccggtcgttttagcattctgaatggccgggatgcacaataggaatgccgatcacgccttctaggggtaatctttgacaagcacaacctaagctcgaaccggtataattgttcgagatccgaggaagttgatgtccgagccgaggtgatcactttccgacttcattttgatactggccgaggtacctattgtctgagccgacattatcaaagccgagccgatgtgaccatgatcaatattatcgcatgctcgatttctgccccttgatttctgccccttgtcgggatatcaagtcttctgtcaattcatcagtcagtcgcttcagtaggctcgccgaactatactttgccttttcaacgcagcctctgccactagggacataggggaattgaacgtctcttattcccctatcgccacgtgtcttattaactgcttcttttctgtatttctcaatcatgacttttggggctaaaggacaatcttgcccctatacccaacagttactctatcatttttgaaatctggcggttactcttcttattttgatgcgccccttccgtttcattgttattttattgaggcaattaattttcacttttctctccatcttcttggcatccctcttgttcgtgctttctgctgcagattcttcgcgtttgtttctcacttcgacttccgcttctgcaaccctcgcatttcttgggcttcctcctcaattctccttccatcatcttcattcgttttccaggtattcttctgctttccttttccttttgtcttctatcgttttctgcattttgttcactttacccgattcttacccgattctgcacaaaccttgaatatcgctttccttcttcatacttcctattcctttatcttgttctgcattattctctttagccatgaaatatacccttgaacaagaggcagaaattcgtagaacttgttctcctcgcgctgctttctggctttatggtttgcccctctctgaagaggagaagagaaaatctttgcttaggaccccttccgcgccaggaaatcccaagactccccttccaaagccccctaaccctcctggattaaggctctctagattagggtcttttaattcagggtcatcgtcccgccaaagaccagcactcctggccttacaatctgggacgtccgctagggtttcccctccttcagatattgcccctccaaatgaatccgaagcttacccgatacccgaaccggatttagtaattcgatatgaaccctgcccgagttgcacagaggaattcatatatctagccagtagagatcgtgataggcaagccgagggagtgttagatcgatgccgacataaccctgtttgggtccataagcctgttccaagagaatcaaaccttcccccgacccgaccgagtcctaacatcgggatgccaacttctgtggaacaggcggtttctgttgaagcacctatccgaccaactccgatctctgctttccgccctttgccgactcttccaggtacttcactaatgattcttttttgttatcgtaggtaattatggactcatctcgggccagaattgttgatgaatccgcaactgggtctcggcctcaagttcctccttcagcgctaacaggtaggtttccttgggtaacccatgaggtgctacaacacacctccactatggattccgaggaccttgcttcgattccctttggggttcaggaaggtttccatgtcggtcttccccgcccgggtgaactaatttgttcttcccgggaagggaatgaccccgacttctttttgttttacaaagatgtcattactcggttgggagtttgttttccctttaccgacttccaaatgcaggtattgaatcatctgcaagttgctcattcccagattcatccgaacggctgggcttttatgcaagccttcgagattctctgtcaaaaactggaacttgtatgtacccgtcctttgttcttttatttctttatggttcaaacaagtcgatccggtaaggaacctgccgaccgaaaaggttggacttctttccggggtcgcaccgatcatcgttctgatcgtcggcttttttctttatacgctgagtcctttaagggcttcaaagacaaattttttaaagttgtggccgaacccggtcaacgtcccttttttgctctttctcctggatcttcctcggaatcctggaagtttcccctatattggtcttctgctcatcatgacctcccttctgcctcttaccgaaccgacgaggctcagttgtcggattctgacgtcacttctgctgcccgaattatctcgtacaaagagtcgggaaacttggcccctatatcttattatgttcggtgtggtcagtcttaattccttttgaaaaataagtctgattaattggcttttttcttgacgcctaatattttgatgtttatgcagctgttgaaatgaaccttagccgtgctcctcggcccgctcatcttgaggccctgaagtcgcggaagaagcgaaaggtggccgggggggggaggggtaaggccgctgctgctgtttctgaagccgcccctacttctgccgtggttacagcgactccccttcctacctctccggcggtcgacgactctgttgtcattttggacgggccgtcggacaatatcacctcggctgctcctgtcacgacggacgctgtccctcctcctgactccgagcacaccgagaatcctctgcaattgtccccccggtctctttggactcatggggttaccgcggactttttggaggtggttcgggcgcccaagaagtattccgacctggttcctttctcggctcctgatttggaggaactgggctccttggaattatcttgtttgaaaactgccaccttgctcagaagtttggcctcgctgaagagaaaggcctgcaagatgtctaccgagtttgaagcctctaaggtcgagattcagcgacttcaacaggagttgaatcttgctcttaaagaggtggagacttctagggcggatgtcaaggcggcacaagaggcggtggtcaagctgacctccgagcttgaggagtcccgggcccaccatgagacttctcggttagagctggaatctgcacgctctaccattacgaagctggaacaggatctcgtggtgagccggggacgagctcgggatgctcgcgatcattgcgaccagttgcttgcccttaacgacaaggggaccagggatcggaccgagctgctcggggaactcacgtttgttagggcttaattgttgaagtctaccgaagcttctttcaataatgctttggatcagattcgcctgttgaaccccggcgtcgagttgaatacctcgggtatgcactttaaatcgtatgtcgggaacggccagctgatagccgtttctgatagcgaggaagaagaggcgagcacggacgcacccgaagaagccgggactccagctgactgtggaaactgaagggccgggatgccggttttattttgtatatcttgaacactcttttcctgttcttgaacaagtattttttttgcacttttttaagtacctttcgtcggcttttataaattgctgttcatttcttccgtatatcggctccaacggccaacttgctagtcggttattatccttggtttagccatattttattgcacccgaactattcaatcggtattaaaaatggaatagggatcatgttcccgtcttagcaactgttaatatattcataacttaaccctttagatgtaattctttcggaaaaatccgatgattcatcctggattgaatagttacgccggcctgatcaggaccgagctaatattaaacaacgactaagcgctcatacttcgtgcacgaagagtgttccttgcatcatggattttattaataattcatgatatcaattacaaatttgcgcgggtgtatgttcccggttcacaattgattgatacaaacatgaaaaaaaaaaaaacttcaactggacctcaaaatagatttgcgcgggttataggttcccggttcacaagatctaatgaaagtcactaatgccatgatcccaatgacgggcccgagggccaactaaagggaaacacatggtgtccatgattccgatgacggtcttaatgtcggctaaagggaaacacatggtggagttccatgatcccgatgaccgactagaagccaactaaaggaaaacacatggatcttgtctgcatcttatcagctatagtatttcttcagcttgtctacgttccaagttcgttggattttcttgccgttcaatgtttccaataagtaggctccctggccaagattttggactactcggtacggtccttcccaatttgccgctagcttcccgtctcgagcatttttgttcccgatatccgctcggcgtaacacgaggtcgtccttgtcaaaggacctcggcttcactcgcctattaaatctttgtgccagcttgcttttttgatggagatcctgacggtgggcggcagcgcggacttcttctatcaaatcaagctcggccgttaaggcagcattgttgtcactctcttgtgatatatgctgccttctccatgatgattggccgatttctaccggaatcatggcttcacagccataagtcatcctgaatggggtttcgccagtagctgtttgggtcgtcgttctgtaggcccacagtacgtagtatagttgctcgacccaattcgggccggcttcttgcattcttttcttcaatccatcgaggatgactttattggccgcttctgcttggccgttggactggggatgttctactgaagcaaagtgatgtttgatatggaggccggccatcattgcttggaacgttctgtcggtaaactgcgttccattgtcggtaacgatttccgccggaatcccgaaccttgctattatggtccgctccatgaacttttgaacccgagctgaggtgatggcggacaatggctcggcttcgatccacttcgtgaagtagtcaacggccactattagccatcgcatttgacccttagtagctttgaacggccccagcaaatccataccccacttgtgaaatggccacggtgcagtgatcaagctaagctcggacgggggaatccatactatctttgcgtgtttttggcaggcattgcatcttttaacatgttctgttgcgtcggctttcatcgtcggccagaaatagcctgcgcggagagcttttagtgctaaagccctagcgcccatgtgttgtccgttgatcccctcgtgtatttccgagagcacatactcggcttgatccgagtttagacatagtaatagtgggctatgcagacctcggcggtataattcatcgtcgaggattacatacatcgccgcttctcgaattaacttttttgcttctagctcctcgtgcgggacgattccttgctctaaatagttgacgatgggtcttctccagtcgtcggcgataaatatgatcatgacgcatgctggtcgggcgagctcttgttggataactgatctataattccccgccccttttgtactagccaattttgagaggatatcggctcgggtgttttcctccctcggaatgtgggcaactattacttcgtcaaattccgccataatttccttcacttttgctagatatttggctagtaaaggacccttagtctgatatctgccctcaatttgtgcggagaccagctgcgagtcggtgaagacgttcacccttgttgctccttgctccttaacctgcttcaaacctgcaatcaaggcttcgtattccgcttggttgttagaagtcggaaagttgagctgaagagactgttcaagggatactccgtcggggttttcgacaatgaccccggcaccgcttccttttgcgttagatgagccgtcgacgtatactttccagactttgtttttctgctgggtggtcgacgttggtgtcaattctataatgaagtcggccaaagcttgcgacttgatagcctggcgggcttcgtattggatgtcgaattcggacaactggatggcccagttcatcatccgtccagccagatccggtttgtgcaacacttgtcggatgggttgattcgttcggacgatgatggtatggccctgaaagtatgggcgaagcctttttgccgtagtaactaaggcgaaggccactttctcgagtttctggtatctcaactccgagttcttgagggcccgacttacaaagtaaaccgggtgctgagttttatccacctccctgaccaaggcggtactgatagcttcttcaccgaccgagagatacaagatgagcgtttcccccggttctggtgttgacaacacgggaggtgaggccaagcatgcctttatctgttgaaatgcctcttcgcacgtcggattccatccgatcttagcttccttctttagaagcttgaagaatggaagagccttctccgcggatcgtggtaggaatcgggtcagggctgccatccttcccgtcagctgctggacttctttcttgctggtcggaacttgcatatctaggacggccttgcacttgtccgggttcgcttcaattccccggtgggtcaacataaaccctaggaacttcccggcttttactccaaatgcacatttcagcgggttcagccgtatattatgctgccgcagcttttggaaagtttcctctaggtccttgatgtggtccccggttgcggaagtcttcgtgatcatgtcgtcgatatacacctcgatgttacgcccgatttgatccgagaagactttattcatcattctttgataagttgcccctgcattttttagaccaaaaggcataactttatagcagtaattagcactaatacctcgaaatgccgttttttccttgtcgtcggggtgcatgggtatttgattataccccgagtaggcgtccatgaatgatagcagtcggaaaccggcggagtcatctacgagttgatcaatgcttggcatggggtacgagtctttgggacagactttattcaagtcggtgtagtcgacgcatacccgccattttccgttgggcttcttcaccatcactacattggaaagccaggtggtatattggatttctctgataaatcccgccttgagcaattcttcgatgtgtttggtcaacgcctgctttctgtctggaccgagcttcctatttttctgctctatcggcttagagccgggatacattgccagcttgtggcaacaaaaggtgggcttgattcccggtatctcggatgccttccaagcaaagacgtcctgatttttcttcaaacattggataagcctgcctttatcttctgggtcggcctgcttgcctaccttggtggtttggaacgaggagtcgccgatctggatatcttcgagttcgtctgccggctcgggtctccattcctctacatcccgcatatcaagctctactaaattgatcggtttccgaggtggttgttcctcggtcttggatcccctttgctctccttgccgaattcgaggtggtgatgacggaccgccctccgtttttctgatcgcgttgtaataacactgccgggactctttctgatctccgcaaatcgtgatgactctgccgaggtgtcccaccatcttcattttctgatgctttgtggacatcaggatatcccacttatgaagcgtgggtcttcccaggataatgttgtatggtgacgggaactctccgacggtaaacgtcaccttctccgacctgaagccttctcttgttcctaatgttagctggaggtcgatcaccccttttaggccggtaccttcaccgttgaagccatacagcattgtttggcacgacctcaggtcttcctccttcaagtttagcttctcgaaagcgctccagttgataatgtcagctgaactgccgttgtcaacgaatatccgcttaactcggaaattagcgactgtcccggttatgacgagaccgtcttcatgtccgggcacaacgcccttcaaatcttcgtcagtaaagtagatcagcggaggtgtgtctttcttgctgtctccgccatcggtttgtttgaactttggccggtctcttaccgacatgacttccttaaggtacttcttccgctgatttgccgtatcgcctcctcctcctggtcctcctgcgatgacattgcattcgaactcgggttctgggaactcgtcatccttcttacttttcttgtcctcccgtggtttattttcctgttgaactttcctcttggcttggtgtccctgggttcgaattacgtattggcgcagcttgccttcacgcacgaacctttctatagcgtctcgaagttcccagcactggtcggtcgtatgtcccgggccattgtgaaaatcacaatatcgggtataatccatcccttccttccgtaccactggaggaggtcgggtcacttttctcatctccgtgaaggccacctccttccaaatttgtccccggctagcgctcaatggagtgtatctttcaaacttcgattcatatttccccgatctaggccggttgtcggagaatcctcgtggaggtcggcctgctgggaggggagttggatgtcgactgttttgtccgacttggatgttctcgggtcgtcggtttcgcggtgacgtcggttttttgttatctcttggagccaagttggcaatctccatctgctccagctccagatattttttggatcggatgccgaattcgttgagggacttaaccgggtctttgtatatcgacttggcaagtcgggaggatccgttgagcccggcagacaagagatagacatggacgttctcttccagcccatggacctgcagtgcggcttctctaaatcgatccaaatagctttgcagcgtttccccgttctgttgacgtatccttcccagagcgaactcggatttcggctgcttcttgcttgttgcaaagttgagcaagaatttctggccaaaatcttcaaaattgcggatggacctgggtggcagtgagtggaaccaagtctgggcggcaccggttaaggtcgtcgcgaaaatccgagatataatgggttcatcgatccctcggacacacatttgcatatcgaactcgtcgatatgtacctgtggatcctgactcccattgtacttatttagaaaagacccatcaaagtcttccaaaaatggggcgttcactatgtggtcgacgaacgggctgttattttggtggccccggctatattttctcctatatatgccagtgccttgtccgggatggcgggcgacctctcccatcggtctctcccccgcggtgtgtgaaatggccgtggatgaatgaacctcgtgctgtggacgaggtgtttttccttgttcggaatggtcggcaggctctggttggtcggttcttgctgctcgggtcgacatcgatggtcccgaccttcttgctgttgcatggtcggcctctgggcgacttccgtcgtgtctatcgccggtattttgccgacgctctgccgcgcgtcttctgtcgtcacgatcctccaactgagcgatcagctgttggatgtcttcctggcgttgtaactcgtagcgcttctccaagttctccattcgggccaacagggattggagagcgctctggatgaagcgttgagaattctcttggtcggccggtggtatgttggccggctcctgcgtcgtaggttccgcacgagatgatgccgtgtgggatgacgcgtcttctgccaccacctcctccggagtcggattcctgggtgggtcttcacgtctggaattcggatttcttctaccgttagccattgatagatggtgggaatcgaattttatcgttcccacagacggcgccactgttctgctcggtgagaacagagatgtccaacaatggagttgggcaaattaatgtaggatcaaactctctctctctcaagaagcttatggagacgaagccacttgaggaagaagatcaccgcacgatgaacacgacactttggggggtgcggtgtgtacaggtgtgaaggaaaagagagagttagaattgtgtgtacctttcaccatgaattgccgatatttataggatacctggagtttgttcatcaaacggttgcgcacgattcctatatatgtggagacactggctcgtgggggataacggccacccccatatttcagggtggttatcgcgggctaacagaggttgtttgactgtttcaaacaagataatacgtttccgtaacaaccagatttttgtctcccaaagttttgagctttttgatatttattgtgtacgtgttgattttttctcatgggtgtcaagttacgagtttgtttcttgcataaacgttgtttctataccattttactcgcaattttgagtcccatttgggagactaaaagacctaagattttggttttgaaaatcagattacattttttatgacgatttgtgattatatttgaaattgcagtttcaaggaaattattgtaccattgatcggtaatatttgtaatctggccttgttttctatgttcagatatgtgatgggtggtggtggctcagccgccgcatctgtggatgtggaatagggaaaaaggaggaaagggaggggttgccgaaaattgctttctgcgtaggtgtcgttgtcggatacaagaaaaatggaagaaaaggaataaatcggcaatggtgatgaataagccagagggataaatcgcagtcaagaagaaaaggaaaaaattataaagaaaaaaactcatccatgggattaaaatttaataaatctaatggtggaaattcactttccattgtggaagacctattatattctcccacgctagtggattaattgtacattatgaaacatttaatactaaaaataatattcaacgaaattatagagtctaaatgtatattttattcaaaatatttcaaatcttgctttgaattagttgttgacactttacaccttgtttcatactaaattgtgcaagatgtaactatatatataggatttaggatttaaatcatggataataagaaccctaaatcctaaattataaaccacatggaaagaaaaagactttgacatggtgtatgtgtagtttacggaaaagataatatggattaattatagtatgtttgaattttggctttaaaattatcatgaaatatggtgagataagtcaaatttaattttatctaaaactagataaatggctcatgactccacctgtagtaattttacaatttataattttttataatattataattttttatgtatttaattattatattttaattaataaaatatattattattaatatgttagtatttaagttaacatttttttattatcattataataaattataatggtggaaattcatccatgggattaaaatttgataaatctaatagtgaaaattcactttatcattagtgggagacctattacgctctcccacgctagtctctgtcagattagggattgaattgtacattatgaaagatttaagactaaaaataatattcaacgaaagtacagagtctaaacatatattttacccaaaaatatttcaaatcttgctttgaattagtatttgacatttaacaccgtgtttcatactaaattatcccacatgcaagaggtaactatatatataagatttaggatttaggatttaaatcaaggctaataagaaccctaaatcctaaattataaaccacatggaaagaaaaagactttaacatggtgtatgtgtagtttatggaaaagataatatggattaattatagtgtgtttggattttggctttatgaatgaacataagatgagtcaaagttgattttatctaaaactagttaaatggttcataacttacaccacaataattttacaatttataattttttttataatattataactttttaagataacatttttattattattatcattataataaatatttatgacaatttaataaaaccatgataataaaaaaattaccataattattacaaaaacatattagtgctaattaaattataatccatattatctcatgcatcaattattttttgactacaaaaatatccctaattaaataagagaaaaatcatattaacatatatatttagaagagagagcaacattaatgataatagtatttttgaaaacatattattttagaacaaatttataattatcaacttaattaattatttttttaatattgataaattagataattgagtcttataaatagaaatagaggtaatataatatagtagatagtagattttgcatgtttagttattttagcataatcaattttaattgaaaaaaattatatatgatggagttgaagtaggaataacttctacttctaccaaaataaatcgtagttatattttgtttaatttactttcacataaatactctcatatgcatatgtttgtttttatttatttgtttaaaaacataattaaaattcttgctatatttatagattctagttgttatattttttttattgaatgcattttatctaatttatccttgtactcataaccataatattgtgataaatcattttaaaaaaatgaaatattatatttcagtttaattattggtacatttgggtttaattctatatatatatannnnnnnnnnnnnnnnnnnnnnnnnnnnnnnnnnnnnnnnnnnnnnnnnnnnnnnnnnnnnnnnnnnnnnatatatatatatatatgaaaataactaattgttatagaaaatcagtgtatatagacattcaaattcattttgatcattacaccatcaaaatcaatttaatacaaacctatagtgcaaatcaattctaaccataattatgtaaaatcattttggtgcaaatcgacattgattagtttttcatctccttcaatcatcttcttgccttaacttgaaccatctacctatagtgctcttaatttcttacaaatctccaatttctccgcgctaccatgaagttgttggagagcaacaacaaacaagtgtcaattacaaacattggcaaaccgcaaacctatacaaaagcagaaaaagaactgaacaaaaacatttttcttgaatgaatcaacagcttaatattacaagatctcaaattaaatatccatccaagagcttattttgaaacttttatacattatgatgcccgagtaaatccataaaattaagcttttcacaaccattaaatccattcacaaatcatggctacatctttgaaaattggattacctgttttttcaattgtatgtgcctgtttgctcttctattttctccgtatagactacgaatgttacagtagaacatgagtagcaatatagagaaaaataaatgcaaactaactaattggtaggataaaacaaaacaagagagatcaaatttaaggtattgtgtttgtttgaggaagatattcgcacacgagtttgaaaccagtattagaaaaaccatcttcaaattggacaattcaactactgaactgctcaaataacatgtctgaatgtctcatcagtaggctactggatcgatttgcaattggttagtagactatcttttagtttctctctgatcacaaactcttttttagcttagcgaaacttgaaactaattcttttaaactaattttggtttagtttggttcacaggaacaatttggtgcaatctctctgctttcgattcaaagctcaagtatagaatcaaagcccaaagcccaagtatatgcacttgtgtgaattttccatgcctttctttaatttgctgacataaggggattagagcttatcattagcaaaaaagggtttatcgtccgaggaattgaagtttagctaaataagagaaattgaatcacataattaagacgaccaagagattatcttagggtggaatcaagggaatttcaacacctaactatttttattaattgatttttctagtacattcaattgtgctaatgtttctttcaatcaaattaaaaaaagtctaaaaattcctaattgtttatctcttaaatcaaaagagtaatcgataatttgattgattgtatatttgataaaccaaatttttcattgatacaataatttgtccttattttatcaattgtacaactagtacacttttcgtattctaaccaaactccaacaatatactggtaaaaggtgactcagttgatctttaagtcaatttaatttccatataactaaacgtgatgggaataaagtacgtagaaccgtagaaatatagatgacacaatttgtttgatgttaattaatgtaaatgtactttctcttgatattcaataaatatgcatgttgtcatcgttaaaaaataaaaagataagctattttttagtttctaaattttttaaatttatctttttagtctttgaattttttatttatatttttcatctcttattaaattggatgatgcattcctgtgtttatcactttattcgatctaaattcctctatggatatattaatgaaaaaagaggtccttgactgcttgggcaagtcctcgcgagggaactttatttgttgaagtatgtattacatttttgtttgcttggaactataataacagatccgtagagagagtctcacaattgatttttaaggcagcatggcacttcgatcaccaaaggttcattccattgatagagtcatcacaccctcaaatacactctttttatcccactctctttcattgctccatctcatcttattttttaacttcgtcctcattgatcctcactcaacctctttgccaatgaataaaataaaggggcaagttacttgaaaggcatagggatagactgtttttggttcttaaacatataaataataaaataaaataaaaacttattaagtgtcataacctgaattttagttttagacattttagtaatgattgtgtaatcttattgaattgattattggcaggctaggatttaagaaaattatgcaagctgacgaggatgtagggaagattgcaatggctgtgcctcttctagtttgtaagtagtctttctctttcatgcatattctagggtgttttcttcttctcttgaaaaatgattttttattttattttatttattgcgcttttggaagtttctatgaattatctctgattaataattatttgtgtttatgtattgcagctaaagcactagagctatttctgcaagattattgtgatcgaacatatgagataactttgaggaggggggcaaagactatgaatgcttttcatttgtaagtgaagtttctattattttctttgttcaaatttttgtctatgtcaagtctgttcaaggtggttacaaggctgcaggtttctttcttttggagggcggttattactatgtacttataagaacatcagatctgcaattctaatgatgatgtgctcagtctcaaacaatttccctcttgtgccttctatttatcacatgcacaaacatgattagacatgtaaatgacatctgcagaagcaaatgttgggatggtcttgcttttggaacatgtgctgtttgttctagtgtttacgtccactttccagtttctaaaatgtctgagttacttgcatcctaacctttgctgaaaacagtgtgtgcagacttttaatgtctttgattttctgaaagatattgtcagcaaggttcctgatttaggctgttctgttgcaactggtgatgaccatgctgtcactaagaggaggtttgtgctctggttaagactcttgttacttggaacaagttttctgtatgctgaactttgtttactttatattaggaaagtttccggagatgatgataatgacagcgatgaggagctcaagagaaaaaagaaggtaatttatcaactgtattcaattacttcatcagtggttagcttaaatttttcttgtgtgattaaaccttttgctgagtaattatctcttgttcatgcacactgtgaaccttttgctggatacaaaaaattttacttcagtcaatagggaaactcgctagtggcttgtgaatgcaagtacgtctaaatgtctaatagtctgtgaggctaggccccacttcaccttaaagctactacacaaaggaccaaaactgtctggttttctgaaaagtgaaaactatacaattggcactaaagaaccttgcagctgtttaatattaaatattatctgaattatggaactttttttttccatgatttgcacagccagagcctggacataacagtggcagaggaaggggtaggggcagaggtaggggtaggggccgtggaattagaactgtacatcaagaggtgagttcacatgccaagtgggaagatgattctgatgaattgaagcagaatgacaactacactcaaagcaataaaaacatggaaaatgtgccagaacctgaagtagttaagcaaagttttccagtgagcaaaccggctgaagtgtccattcgaaattttgacttaaatttggacccagatgaggacatgtagattgttccaatcaatgttgttaaaacttagtgtcaacttagaaacggtgaggatgaacaaaaacgtaaaaacgtgaaatgtaaacaaaacgtaagagtttactacatatacaaaaataaataaatatctaacatatatataacaaatagtctaataaatatatcccctttaataaaagttagtaaatagtaaatatcatattaatagacttcttaataaattaaaagaataaaaaaacattaacaatcaatacatttaaaaagtgattctaattaatttcttaagacatcttatctaaaacttttgccataatactttaatgagtaattatttaaatctaaaataacaatgtagtacataagcatgtcaattattatcctcaaagagacaaaaataacagtgccaagtgaacgactaggctaggctaggctagatgttgtgtgtggtggggaatcaccagggcccagcttctcttctaagatccgaatgtccctccaagaagttcctgttccagcttctcctcttcgtgggtgtcaccggcgccgtcggtcaggagttcctcttcgtcctctccaatcgcaacttcccctatagctccatcaaaatgcttgcgtccaagcgctctactgggcgccgcatcaccttcgaggacgtggaggagctgacaacggagagcttcgacgacgtcgacattgcgctcttcagcgtcggtggctccatcagcaagcgcttcggccccatcgccgtcgattggggaacgatggttgtcgacaacagcttaccgaagtgaacccggaagcaatgcaaaaaactgagtcaactcggtaaactcttcgagtcaaccgagtttaccgagttgactcgccgtttcaaccaagtcagcccattttccatttcaactaccatttcaacacaatttttgaagcaaaaatgtataaatgtctatttctaccgagttgaaacgacgttttaacaacagcagttccaattagaaatagccacttgcaagtatagttatgacttatgagaaattttaatctcatgtaggtattgcttatggtaggcactacattcagattttgggggtgttatggctcaaaattttaggggatgcctatcttaatcacacttgtatctaccggaattaactcattgctccggcaacatgatttgcatgcaaccttttgaaattttgttatctcttgaacttattgcacgatgaaacaagaggaaaacaataagacgttagacggatagaaataaatacgaaataaagtaaaaaagatgtgttatttagatgaataaaaataggaaggaaataagtgtagaaattcattatttatgtttgttttgaacaaaagaaagagaaaatacaaacaaatgaattatttgaaaaaaaattatacatttttaaaaatgatttccattatttttctaaaataagattattattttttttactatataatatacttgatttttaatatataagcagcactgatggctgctctgcaaaaccaatcttgcctcaaactagtttgtttaagcttaaaataagtaattttaaaataaatattttttaataagcccttatttcataaacaaataacgttatcaaaataagcagaaaattattttttaagcataaacacaatttagacaaatacactaaaaaagaaatcagataaatggaaaagaaacaagagggatagaaataaaagtttaatatctgtatataaaacagttttaggcttttacaaattatcattcactcataacttactagtttaaaagataacaaatttatcatacatacacatggaaggaaggggaaaagctttgacgtgggttatgcagtatagtctcaaattaaggcgagaacaataagaaaggtaatatttcatgacagaaaatgtagaataatctcaaatttaaacacaagcttgattgttccacaaacaaataataatacagtgtcttaaagttatgccaatgtctgtaactctatagtaacgtagtcctgtttggacaaacgataatatctagaccagaagcgtttgtctaaaaacttaaattgaaagataagaaacagaagtattgggaaaacccccattgaagccactgcataagaaacccacttggaagtgtgatcaaatatcaaaaaggaggctgcagtgaaagccacaaccatagcagcaacggagataataagtaaccaacgcccaatagtcaagctgggatgtagtgatttcacaaattcgctatgtgcgaatcttgatgaagtgaaatttgacaagaatgagagtaaagaggcagaagaagtgaataatgcaactgcatttgtcaatatgaagacagtaaaccgtgcattggtcttatcacctggaatagtgagagcagccgcaaatgctacggtagcaacaagtgttgacacaagcatgccagattcggctattcctttggctgtttccttaatttcttcagataacttcttgtgttcatcataaaatacatcaattggtctcttgttcatgttgtttctcattgttcttagttcaccaggaacattactctccacgaactattaacaaatcaagagtatatgtaaatgatggtatcgaaatgcataagttaattaatctttcaattatcacttaataaccagagcaaattaaagcaacagctcctaagatttagtgtaattacacaaacatttcttcaggtattagaataaggtttgaggagatgttaacttaatgctttcaagcatataagagatgttagtgtaatttttttaatttttttaaaaaatagtgtaggaaaataataaaattaatggaattacatataattacacaaaacctatcggaaattattgtaatttgctctaataagtattagatattaaatttgtaagaaacagaatttcaaagataagatattttaaaaataaatcttaggagtgatatttattgttacaaatgcacttgtataatttttaattaaaattttctatctatatattggctgtttaactatcatgctaaagacaatggataacaaattttaaaaaattgttacaataatcaacaaatacaaccaatgatttctatttttaattaaaatttgttactttaaatatttaaaatcagtctagttaacaaaagcctaaaattagtggaattttaaatttttaaaataagattgctagaactgatggatcccatgcgagtgaataaagaatggttgaacaagaaaaactaagcaaattaattgaccttgaaccattcgagctctctttgaatttgaatgcttgctcttaaactggataatttttcgaattcaccttgtggaagatgcgcagccaagtgtagaatgttgttaccatcattgtccactgttcgtagtagatgctctattaatccccgtggtatacgtatactattaaatattttttttgtcgaaatagcacaaccaagtgcagtaggttccgtccatggggcccgtcctttattgtcactagtttacgattcatgtcaataagcatattcacagcatcaacatttcccgattctattgcatcaaacagcactgacgatggatgagttatcaactccattatccgcttatgttccaatttgttaacttgagtcaataaattttcaaatagccgaccagctacttctgatttcttgtcgtccttcccgtttatcatgaggcctatatatagttgattggtccaaccaatgtttaacatgaaatgaaacaaacaaaagttaattaaattaaaattttactcttatatatatgaagcaccattttttatctctatttcaaaaattatatttatattttaatccttacctgaaaaaaaattataagatatttttgcacatgtgactcatgtgttggcaaacattaatttgtgttattagaataactcaacaacaaacatctaataccattattacactggatattgataattaaggactaattcttaatattatatatatatatatatatatatatatatatctttctaaaataagaatcaaaatggaaatgatgtcaaataagatctaaattttagcttagcacacacaaaaaagaaaaaagaagccattttcaacttgtgaaagcttacctaaaatttctagaggcttttgcgccagcatatgcaatgctgtaaggtggtcctcttcatttcttgcaatggccagagcagttggatgtttttcaaataatcgcattgccaaatctgttatacgcacaaattaaatagtacaaggcaaggtaaaactccaactaaattgaaaaaccacatacgagttcatatacatctccttatatatatatatatatatatatatatatatatatatatatatatatatattatggtatctgatcggctcaatgagttcgattcagtttgtaaaacatcatgatatgtaaaagagaactagattaaaaaaaaggataaataaggttgtttagttagttttacacttaccaaacatgttgaacctaacggttattaaaaacagtcgttcaatatccttgaaatccattatgtcaagcactttgttagaggacaaaatgtccaccattctgtcggaaccacgtaaagcagccaagtgaagtggaagcatcccatctgagtttggtattagcatgtcttctggcctcatacgcttaaccaactctttcacaatttcaaggctggcccaatgtactgctagatgaagagctgtctctccactaacatttaacggaaagcgtttcatatcaggacatttatcaaaaatccttattaaagaacctgcaatcctttcaaacttcacattataaaatgtcctctttatataataatcataacttttagtatttagctgcaaagaagacccttttaatttctcgtttaccctaaatcggtataaaaattcttgtaaacttgtctcaaattttgaattcctaatagtttcatcatttgtaaattgaaatgtacctgagaaattcgagattatatatgtagtagtagaaggaatccaattatcaatcacctttaattaagtttgaaatttgaatttgaatttgtgtttgaaaattaactctatgatgataagtaaaattgtttttgagagaagtaatttattttttcttttcttcagttgacaaaaaagcaaattgatcttaacatgtgacttatacttatttatatcatactttaaaagccattctactttttttatctttccaataaaaaaaataatttctaaacccattgttgaaatatcattcgtataataatagtataaatattttttttttttaacgtcaagcggtttcaaattcaattttttcaaaatgtaaaataaacaaactcttaagacatgatctctgaactgcactctcttgtgaatgcaatagtttcaagtgtaacttactctgctcttctggagtcatttcgttcactcctctactctcatttgttggtgccggtgagtttgttgaagtggcaattggagtttgctcatgactttgattaggagtatgatctagtgttggtataatctgaattatgtggtcatctgaaacttcgatattggagttcatgattcaattctagacaaaatgaaatgaattggatacctctatgaaattccctgttcgattcgatcagcgttgctttttctttccagcctgcgaagcttgaaccatgttatatatggtggtaaaacaagagcccttaattaattagttttccaacttgcacttaaaataattatttccaatatgacattttgtggattacagcaatgttaattgaatctgctcaacatttcaacccaacagttttcaaaagtttttaagttgaatgatttctaaatttatataatattaattcatttttaaagtgaataaatatgttcattaaattttttaacagaaaaaaaaatattcattataaaaaaaattatattcattaaattctctggattagcgagactcgctatcatgacactgttaattaacttaatctcaatttaatattatctttctttgttgtacaatgatatgatatatttacacacttaaaaccttcaagttcctacctactcttgtattgttgacgaaccatagcgatggttatatatttatccaacttccgttgacgcatttaattatatgattatatcctaactctggtctttttatactagttataatcaattactccaacaaccattgaattcaaagctaatactagatgcatgttattatcggaatatgtataaatttattaaactcactccaacaaccattgaattcaatgttaattcatttttattatatcctgactctggtctttttatattggttaaggatattttgattcaatatatttaatagttacgttgctaattatcattatgatatttttttgtcaaatatgttattttattgacggtataaaagtcaacgaattgatggatttattgtatttttttatttttattgactaaaatttaaattttcatttataaaaaaaatgaataaacgaattttcagcattctacacataaaaaataattattatttatccaacacatttttataaaatttaggaagacatgggctatgatgggagaggataatcgatctcttaccgtgaaaaagtattttataaccatcagactactttgtcttcctgtttcttgtactacctttttcctcttttttcttctcttctttcccattcttccactccaagattgatcctgaaaattctttagttcggggcgaaatgaaaaaaataggtccctaacacataaattttttgaaatacaaataatattaaaactaggagatggaaaaaataggcccttaacatacaaattttttgaaatacaaattatattaaaactaaggaatggaaaaaatgggtctctaacacacaaaaaataggtccctaacacacaaaaaatgggccctaacacacaaattttttgaaatacaaataatattaaaactaagggatggaaaaaatgggtccctgacacataaattttttgaaatacaaaaaatattaaaactaagggatgaaaaaaatggatctttaatacacaaattttttgaaatacaaataatattaaaactaagagatggaaaaaatggcccctaacacacaaaatagaccccttaacgcaggtttcattttttttttttttaaattacttaagctatcggtgtaaaaaaatttgggccctgggctggcaccccgttcgccttgccccagggtcgaccctattcctcttttcgtcttagcgacaacggtggtgcatgacggccggtgatattggggatgttgatgcgtcattctaccacaatatttcaaccggagaaaaagcatggaagacgaaacagtcataaagcttgatataactattgtctcacttaaacccaaattggattcaattgaacaaaccagattttaatctcccaaagttttgagcttttttatatttgttgtgtacgtgttgattttttctcaagggtgccaagttacgagtttgtttcttgcataaatgttgtttctataccatttcactctcaaatttgagtccaatttgggagaataaaaaatctaagattttggttttgaaaatcagatgaaattttttatatctggccttgttttctatgtttagatatgtgatgggtggtggtgtgttgcgactattccgcacactacggcaagtgcaccgatcgtttcaagtaataaactaggtaagtgagtatcgttctccacaaggattggggtgaagttcacagtaataaggagtcaatgtgattgaaaataaaaacagaaaatgttggaagaaaatagttggattgattggttgagtaaaacagaaattaaaatcaatagtaaattaaattaagaagttaccaatggaaaaacaattgtggtcaggcgcaatctcctttgattcctccctccttcacttgactggtttattactttaatttactcaaatgataaatctctcataatttcgtaaatcctaatttattagcgacttatccctttaattcgatcgagaattctaatcccttagcaatcctgtcaaactaagcatttagagaatatatcataagggttcctgttatgattgttcagagaataaatcttttctaaattagttaatccctaatcccttagtgaattaaccctttaacctgaatcgaaaacctaattccttagtgaaatctatcagtttaagcatttaaaagaccatattataatttctgcagctacgcatccctatccctaggtgataaacaactgttattctaaacaggtcagaaattagaatcccaacgtccccattgcgaatcctaaccctagatacttaattgaagtgatcagttccaaataagaatggaaaataagaatagaatagaataaaacaatcaaaacattattattcaataccagtcaaattacagaggagttcacatcagttcatggccttcccacaatacaagatttagcatgccataggcctcaagaacatcagagcagtagaataatacatgactgtgctgaaaccctagccttgattcttgatttccagaggtttagaatgatgtttacaatgtaaaagatgatatccagatgtccttttctcagttcagaggcctttcttttatagatagatttaattagagtaataagacctaaaactgtgctcaaattcgaaacagataatttatttaaggaaacagaatccttgtggcgcgatccgcgcggagtctcgcgctaaccgcgccgcctgttcgaacacatggccctgatcgcgtggagtcttcgagaatgaaggtctgatgctgagcttgtggcgctgatcgcgtggatgtggcgcgatctgcgtgggttattcgagttaaatggcctggcctcatgtccttggcgcggcttcggcgctgatggcgcggtgcttgcggccttttcacgctaatcgcgtgaactcccacgctgatcgcgtgggatcttcgagaatggggccttcaattcttcacctggcgcgatccgcaccggacttgaaatcttgttttcttctccttttgccttgaacttcctctttttaacctgaaattgctcaattggtaatgaattgaatttaaaacaaataaaatgataaactaactattcttattctattttcctaattatttaactaaattatatcctaaaactagcctaaaactaggatgtgtttgcaacacatcaaacaattcccagatttgaaatttgctgtccccagcaacagaaagaattcaagactaagcaagagtcaataatcaaacacaaaccacaggttacaatcctagaatcatcgtgctgtgtatgatcaaattcaaatcaaaactttcaatggtactttcaatgctgtcaatcaatgagagcaacttgagtattcctcacagaattatgtttaatcactcattcactcaagtgtatcaggctatgattactctcttactcaacaaagtcacagcactaccataagcttgaaaatattatcaacagttgcaagcacgacttgatcaaaaggtctttcaggcttgtaacgtggctgggctaagggtaggaaattatttggaaaagtagcttaatgagaggctagatccagtcccttaagtccaatccttgtgatcttccatgcttcaaaacctggtacttttattcaaactatttattccaagtaaaataaaaacagaagaataactttctcttttttgttttttttttgttttttaataaaacaatcagattaaagtaaaacataaacaaaattgaaaattactgcagcttcacaaatctccaactgatggacttattgttctccaacttggactatgcttgttcattcttgttcttcacaaccaattggattcacttgtgttccttgataccttgatggataattccctgtttttccactgtcatggacttatatcaaaccttttctagcctcaggaatttggtcaagtggatatagttctgatttgggtcattttgaaatgaaaggcttaggctcaaataaggtgcaaatggaaaataattgaaggtgagtcaatttggccctagtttcagaagaaaaatctgtcttaatcatatcaagtcacacctgcatccagagaaacaattcaagttctagagtaccatgaaaatggagtctctcggaagaaaatttatcattgttggctcaaaacctcacaggtgttagaacccaagtcaatctcagctgactgcatttcaagcatcatttcaacttcaacatgcatttctcataccaacaatcaaattccattcatgcatcatgcaggtcatgctatgtctcatttcatcaagcttttatcaaagaactctatccattactgtgtccattcacttttattctgaaaaatctgatgtgatgcttatttttgaaattttttttgaaaaattctgtttctgttagacgtcatctgttccttgattgtgatttgcgaaataatgcgtaccgaccattcccaaatttatatgttgctgtccccagcaaccacaaataaggtcacaacgctttggaaaatttcagcattatttagaaaatcgcattcaactcaacattgatctaaacagcttttatttgcaaacatgaatcagaaactgtactatatatataaatgcagtaatgtaaatgtgcagaatgcaatgtctaatgcataatcataactaagacataaaaccagaaacatataaaataaacataaaatagaaactgaaaatatgatcctgttcactcctctccctctctactctctacaatcactgcagcatctgtggatgtaggctcctgagtggatggctctatagctgctgcatctgcatctgagggaacatgagggtctctgtggctagaggtgtggtatctgctggtgtaggagggtctgaagctgcaactggtggtggtggaatttgatactctgctggaggaatgcctaaatgtctacgtatggctcctagcatactggtctgctgagccagctgggtccggacgaactcctggaaggccagataaatgggagaatctgtgtagagcggctcatgtccaagagtggtggaagaaggagttgaaactggtggtgcatatgctggtggctggactggctggggctcctcaggtgctggtacatctctggggctgcgggctgctaactcctcaggtttgagcttagaagctcggagaacctgctcatcagctgcggtcgccatggcgtccaaataggtcttgtggaccataagaggtgcgatcgggacgtccatgggctagtcatcatcaatgtgcacacccgcatgtcggcataaatgtagaataagggaggagtgcgccagccaggatttgttgctagcgtcttgtatcatgtgaagaatcctgttagagaggaggttagagataaggaggttaccatcacctctaagggtataaaggaagacagccctctcgacgttcacatcagtcatattagtagaaggtatgactgtgtgattcacgaactgatgccagaaagcggcatcgcccactaagtcgtgcttccgcagcttctctggtatataatccagcccaggcttgggcttccaagctgtataaaggccggtgatggccctgcggatagtagtggcaagatgaggaacatcgtccctgtacatcttcgtcagggcgtcgggctgcatcctcaggaatagatggatgaaatcacagtcatcgaagggatcatagcgagtgtccaagatgctctcaatcgccttctcatcaaaggaaacttggacacccctcacccatgagagtctgctacgtgccactgtatcgggatcaacattagccaagaattccttcagaatcatgctggaactgggctccggaaaactgactaagcgctgccactgtcgtctgagtatgacctcacgaactgggttcccctctggtagtacatcccacagaatcttcttctcggggatgactttcttcaggagataccaggtgtcaaacttctcctggcactcaggggatctgaatctaccctcatcataatccgcaattcgagccctcttgctgccacctgctcctgtggccttctttttgcccttggctacctatttaccctgtaactcagaacaaaagtagatatagatgcataattcaattgattcaatccccagatttgctctttgccatagttcagattaaacaatcaattaataagtaactcaggcactatgcatcagtgagtgatatccagaaaattcaaggtgtaattcaaatccagcatcaataacattgttaatcagtttaagtttccagccaatattgtcaacaacaggcacactcaaatgggttcaattcagtttaagcaaaataagggtccttcattcccagatttaatgatctcacctacttatcaaaacaaaactcaggtatttcaagcaagcaccacttcaattatcaatttggacagtaactacatgcacattctgtcacatagtaaatggtggcatttggattcccagatttgactacttgagagttctcaattcatttaaacactagttgatatagtgcagtcaaaaacagatctatgagtttaagtgaccatagtcaaagcatttacattattatgctcaattcatgccaacacaactataaagcaatcatatacaacctaagcattttggttacttgcatattcagtcaatcaccgggttaaacaaattctattcctaacctgagactagcccttacaattcccagatttagcttagcacaagttgctaaagatggacatttaatttaagtgcatcatggatacagtctagcaaagtcagtaatcactcatcaaacagataaatacaaaccattgtccctgttttggttcaaaggttttgccatgcttagtcattcccagattttatgtgattagttgtgcaaagcttactcaagaaccttttatagccagccaaattcaattaatcaacagatcacagtgtgaagtttaatgtatccaccacaattgaattccttcatctagctcataatctgtcaagcattataacttatcatgcatttcatatcaatggttgacagatcaaggtaacttatttcaattcaaggttacactatcattcatactttacccaaattttattgccacacccaatcaaaacaacataatgcagctctcttatgcaacatcatcaattcatctctcaagggttttaagttccctatcattgacagcttcagaacaagcaacatatctaatgttctgttaacacaagaaccttaagcacaatttatggacaacaaagtcatacctgcataactggaatcaaacaaatgtgtctgggccttattcatatcacaacattcaaattgttgaaaggctcaatgcattttaccatagttcagttcaattctcattcaggcattttagcaaacatctaatgggcatataatcatgtcaacacactatgcctattttgaactcatcaatatcccaaatgatcaaaaccatgacaagcaagcaaaatgcaaagcatttgggtctctaccctaaggtttttcccaaaattccatcagaagtaatgtgaagatattaagcagtgatagttgagtttctaccggtcatggttataccattacacatttcaaagcacataagatttagaaaataccttgtcaccagccattgtgcgagtgcaagcttttggtccctactggtgcaaatgcagcagaaacttagagtggagagggaatgagaatatgagggaatgcgcaagtgagacagacaagggtgacagagagtgtaggtcaggctttaaagagtgggagtggtgaggaatgtggttacgggtggttaatggtgatggctgggttgcaggcggaaagagtggagcagttttggggggtgaggaattgaagcgtgaatgggaaaatttaaaataaaaaccagttctgcgacgtcgcgcggttagcgcggatcctggcgcgaatcgcgccgctatgcactggaaaggttttggtttcggcctccccgcgcagatagcgcggagtgtcatgcgattcgcgcggagtccacatttggcttcaattgatgctgtttaaccgcgctgatagcgccatttccacgctatccgcatgaactggagttggagggtccttcagcctcgaataactggcgctgacggcgccatgatccacacgattagcgtgggatcttaagtcccaggcttttggtccgaattcttggcgctgaccgcgccattggccacgcgagtagcgcgaaattatgcagaattcaggcttggtttcgaacgtctcacgcggctagcgcgagtggccacgcgatccgcgtggattggccgtgtttacggcgctggtagcgccacgcctggcgcgagtcgcgccataccttctgattattcttcctcttctttttatttttgctttttaattgctacccctaactaaagttaataggcttaataaaatgactataattaaataaaactaatctaatgctaaggctatcaaaatctagaaaggaattaaactatctaatgatgcatgagattaatagtagcatgaaatatgcagtggaacaactactgctatcaaattcaaagcatacttaaacagaacttaaaatagcaagtatgtacattaaaattgtgctcgtttaacgtcttaagctagacgcttacttccatttaaacctcagtggcgttgagtggaacagaacttgagtttctgtcgacatctcccccaaaataatgtttcagtctatacccgtttaccttgaaagctcggtcactatccaagggtgagattgccactgtgccatagggatagacttctcgtatgaggaatggtccagaccaacgtgatttcaacttacctgggaagagtcgcaggtgagagttatataacagcacttgttggccaggaacaaactcctttggacggatttgattatcatgccacttctttgtcttttctttgtagattctggcattctcatatgcgactaacctgaactcatctaattcatttaactggagcaacctcttttcattagcttttgttagttcaaaatttaaaaacttggttgcccaaatggctttatgttcaagttcaatagggagatagcaagccttaccatagacaagctgaaaaggagacatacctatgggggttttaaatgcagttctgtaagcccataaagcatcatccagcttcttagaccagtcctttcttgattttccaacagttttctcatgtattctcttcaattctcggttggaaatctctacctggccacttgtttgagggtgatatggggttgccactttatgcttgactccatatttagctaacaagctatctagctgcttgttgcagaagtgagtccctccatcattgatgatcgctctcggcaccccaaatctggtgaatatgttctttcttaagaatgagaccaccaccttggcatcattggtgggtaaagcagctgcctcaacccacttggagacataatcaacagcaaccaagatgtattggttggagaatgatttagggaaaggtcccatgaaatcaataccccacacatcgaacagctccacttcttggatgttgtttagtggcatctcatctttgcgagaaacattgcctgttctctgacaattatcacactgcagcacaaaattcttggaatccttgaataatgttggccagtaatagccacattgcagcactttgtgtgcagtccgatttgctccgaaatggcctccatagttggaggaatgacagtgccacagaatatccggcacgtcgctttcagctacacatctgcggataacattgtcagtgcattgaaaatacaagtaagggttatcctagaaataccttctcgcatcatgcaagaatttcttcctctgctgccaattgaaatcttcaggcataatcccagcagctttgtaattggccatgttggcgaaccatggctgaattgcacagctaacacttgctcatcagggaaggactcattgatttcaacttctggtccatcttgcaagtctttctcttgaatcctagacaagtggtctgcaactttattttctactccagctttgtctctaatttccaagtcaaattcctacagcaataacatccaacgcagcaagcgtggttttgcatcttgcttatgcagcagaaattttaaagctgcatggtcagtataaacaattacttttgaccctactaagtatgacttgaacttatctaagacatatattacagctagcatctctttctcagttgtggcataatttatttgtgcttcattcaatagtttactagcgtaataaataacatgcaagcacttttctttcctctatcctaaaactgcacctactgcataatcactagcatcacacattaattcaaaaggtaaattccaatccggagctattaaaacaggtgcagtgaaagtgttgaatgcactaagacaagcatcatcaaatgtgaactcagtgtgtttctccagcatttggcttaatggctttgagatctttgagaaatccttgatgaatcttcggtaaaaacctgcatggcctaagaagctgcgaacaccactgacattaatagggggaggtaatttctcaattaataacaattaagccctatctacctctattcccatttcagatattttgtggcctagcactatgccttcccttaccatgaaatgacatttttcccagttcaatactaaattagtctcttgacatcttttcagaactttggctaagttagttaaacatgaattaaagcaagggccaaaaacagaaaaatcatccataaatacctcaagccctctttctaccatgtcagagaaaattgaaagcatgcatctctggaaggttgcaggtgcattacaaacccaaatggcattcttctgtaggcgaacaccccaaatggacaagtaaaagcggtcttctcttgatcttccggtgccactggggtttggttacacccagagtacccatcaaggaaacaataatagtcatgaccggcaagtctttcaagcatctggtccatgaatggaagtggaaaatgatcttttcgggttgcatcgttcagcctccgataatccacacacatcctccagcctgtgatggttcttgagggaatcaagtcattgttgtcattttgaatgactgtcatgcctcccttctttggaacggtttggactggacttacccaaggtgtgtctgaaatcggatatatcatacctgcatctaaaagcttgacaacctcttttcttatcacttctttcattacgggattgatccttctttgtggctgccttacaggtttaacattactttccataataattttatgagtacaaaaggagggatttatacctttgaggtctgaaatagaccaaccaatagctgacttgtgctccttaagtatcttgagcagtttttcttcctcaaaccattccagccctctgttaatgatgattagataagtctcatcctcacctaggaagacatatttcaagtgttcaggcagttccttcaattcaactttaggtgctccggttgggatgtcatcttccttctgctccagcttttccagcacaggttctgctgtgttttctgcagctgcaatgctggattctgcagtaatttccgttgttgctatgtttgctgtctctgttgcataatttcctgcagcttttgaattttcttctgcataaattgctgcacattctgctactgcaactgagttttctgctgcatacttttatgcattctctgttgctgctttctgctaaatccttaacttcagttgtttttaatcctgctgtaatacctgcacaaataacattatccaacacatctagcctaaaacaatcatgttcatcagttggatgtttcatggcatcaaacacattgaatacaacatattcatcattcaatcttaactcaagctttccctgctttacatctattaaggccctagcagtggctaggaaagaccttcctaacagcagagggatttcactttcacccttcatgtccaacacaataaaatcagcaggtaatataaatttgtctacctttactaaaacatcctcaattactcctgagggtttccttaaagacctatctgctaattgtaaagacactcttgttggtttaagttcagatatgcctagggacttacacatggataatggcattaaatttatactagcccctaagtcacaaagtgctctccctacatttatatttcctatgcctatagggatgttaaaacttccaggatctttcaatttaggaggaagtttcctctggattattgcactgcactcctcaatgagtgctatggtttcacaatcttgcagcttatgtgtcttagatagaagttctttcatgaattttgcataattgggcatattagctaatgcctcagcaaatggtatattgatgtgtaacttcttaaacatatctaagaacctggtaaattgctgcttctgcaattgttgcttagtctgcaccggatatggaggtttctcaaagcgagaaaagtcccacttctttggttgaggtgcagaattctgttcatccaaattttctgcagctttttccttggctgattcagttgctgcagttttcttctcagcttcctttttacttgcctcaggcttttctggtgtagtcaataccttaccacttctggttgtgacggccttggcatgttcccttggatttataattgtgtcacttgggaactgacctggtggtctctcagccaactgttttgcaagctgaccaatctggttttccagatttctaatggaagcatcttggttggttctgtgagctctcgtttcagctataaaggcattggttgcttggatatgttctgttgttgtctttgtcagctgcaacactaccttttcaagttcagagggttccttgttgggaataggagggggctgcaagtagttattggacttgtagtccagaccacctccctggaatctcctttgatagttatttcctgcagaaaaattgttattcctctgataggactgctgctggtacggttgttgctgcattggatcattccaaatgccattcacctgcacagggtcagcaccaacaagaatagggcaaacattagactcatgctcaccttggcagtactcacagattacatgtggttggctggctgccacttgtgctgcagaaacttgtaatttgtcaatcttttcagtcaatttggctagttgttgtgccaaaattttttgctctgcaagcattgcatcattagtggacagctgaattggttctctctttggctgatggttgatgctttcattctcattatgggccaaagaattgataagctcataggtctgagctgctgttttagaccttatagtaccccttgctgcaacattaacgatcatacgtgtttcaggagtcataccattaaagaaaatacgtacctgcttacctacaggcatataatattgtggacacctcctgattaattcttggaatctgttccaagcagcacatagggattctctgccattctgagtgaaattggtgattgcattcaccaaccggttatatttatccatggaaaagtactcgtcaaagaatcttgagactaagtcctcccaggttgagatgctatttgatgtttgtcggtttagccatctcaatgcatttcccttaacagcaaagggaaatagacttaatcttactgcatcatctgagaccccttggtgtcggatagtgtcacagattctgagaaatctgtcaatgaagtcatgtgggtcttcagaatcttcccctccaaactgactgcgttccaccaatgctatcaatgaagggtttatatcgaagtggttagcttgtattggtggcctcacaatgctggagttgggtctggtgaacataggagctaaaatatcctccattagttcatcctcaggtcttggctgattatttctttgttcagccatctctgcttctgactctaattcaggaattgaatcaaagtcaaaatattcagcttctctctttctttgtctagctagtctccttcggattgttctttctatttctggatcgaattgcaaatcctcagaactaactgaacctcgcataaaacttagagaagctattagtaataaaaactccaatcacaaagattaaaattactgtaaaaatccgttaaccaatccccggcaacggcaccaaaaacttgttgcgactattccgcacactacggcaagtggaccgatcgtttcaagtaataaactaggtaagtgagtatcgttctccactgggattggggtgacgttcacagtaataaggagtcaatgtgattgaaaataaaaacagaaaatgttggaagaaaatagttggattgattggttgagtaaaacagaaattaaaatcaacagtaaattaaattaagaagttaccaatggaaaaaaaattgtggtcaggcgcaatcccctttgattcctccctccttcacttgactggtttattagtttaatttactcaaatgataaatctctcctaatttcgtaaatcctaatttattagcgacttatccttttaattcgatcgagaattctaatcccttagcaatcctgtcaaactaagcatttagagaatatatcataagggttcttgttatgattgttcagagaataaatcttttctaaattagttaatccctaatcctttagtgaattaaccctttaacctgaatcgaaaacctaattccttactgaaatctatcagtttaagcacttaaaagaccatattataatttctgcagctacgcatccctatccctaggtgatgaacaactgttattctaaacaggtcagaaattagaatcccaacgtccccattgcgaatcctaaccctagatacttaattgaagtgatcagttccaaataagaatggaaaataagaatagaatagaataaaacaatcaaaacattattattcaataccagtcaaattacagaggagttcacatcagttcatggccttcccacaatacaagatttagcatgccataggcctcaagaacatcagagcagtagaataatacatgactgtgctgaaaccctagccttgattcttgatttccagaggtttagaatgatgtttacaatgtaaaagatgatatccagatgtccttttctcagttcagaggcctttcttttatagatagatttaattagagtaataagacctaaaactgtgctcaaattcgaaacagataatttatttaaggaaacagaatccttgtggcgcgattcgcgcggagtctcgcgctaaccgcgccgcctgttcgaacacatggccctgatcgcgtggacctccatgctaaccgcgtggagtcttcgagaatgaaggtctgatgctgagcttatggcgttgatcgcgtggatgtggcgcgatctgcgtgggttattcgagttaaatggcctggcctcatgtccttggcgcggatggcgcggcttcggcgctgatggcgcggtgcttgcggccttttcacgctaatcgcgtgaactcccacgctgatcgcgtgggatcttcgagaatggggccttcaattcttcacctggcgcgatccgcgccggacttgaaatcttgttttcttctccttttgccttgaacttcctctttttaacctgaaattgctcaattggtaacgaattgaatttaaaacaaataaaatgataaactaactattcttattctattttcctaattatttaactaaattatatcctaaaactagcctaaaactaggatgtgtttgcaacacatcatggtgcatggtcgtggttatggaatagggaaaaaggaagaaagggagggttgccgaaaattactcttaatgtaggtgttgtagtcgaagacaagaaaaatggaaaagaatggtgaaaaaaatgaaatgatgctgccggaggtgattttcggcaatggcgcatagtggctaacgacaatggtgaggaataagtcagagggataaatcgggaaagtcaagaagaaaagaaaaaaattcatccgtgggattaaaatttgataaatctaatggtggaaattcactttatcattagtgagagacctattacactctcccacactagtctgtgttagattagggattaaattgtacattatgaaagatttaagactaaaaataatattcaacgaaaatacagagtctaaacatatatttttttcaaaaatatttcacatcttgctttgaattagttgtgtgacatttgatagcgagtttcatactaaattatcccatatgcaagatgtaactctatatataagatttaggatttaaatcaaggataataagaaccttaaatcctaaattagaattgtagatcaaaagatgtgttcacatgccaagtgtgaagatgattctgatgtattgaagtagaatgacaaacacgctcaaagcaatgaaagcatggaaaatgtgccggaacttgaagaagttaagcagagttttccaataagcaaaccggctgaagtgtccattcgaaattttgacttaaatttggacccagatgaggatatggattcattaaacacaccaacttctatcccaactagttcatctgcaaaatcagtgtcagaagagaagcatgaggaataccctggatgatccctgtctgaaatggaaaaaatgaccattgatcccattcaactagccaacataaatggaaggattgatgaagatgaagaggattatgatgaagaaatgtagatgaacatgtgttggtttattcattacttctcatataggcaggagcggatccagaaaataaatcaaggagaggcactcaaaagttcaaatacatatccagaaaaataattacaatggcatccttctaggccttatttttggaattccttcataattgccttattatcaatgctttcaaatacatctttttcaatataaggcactaaacaatcattcaaccattcatcccccatccaattacgaagtgtagtcttgatgtatttcatagctgaaaatgctctttccacagatacagttgctacaggcaaagttaatgctaactttacaagtaaataaaccaaaggatacacaatatgttttttcttttcaatcataatcttgacaagctcagctattccttgcaaattcaagaaatcagaatcactttgcacatcaataatatatgtgtcaagctgatattcaagcatgacaaaatcattcaaatcaaaatctgaaggatagaagttagcaaattcacacaacttattcttgtcaaatgtcgagaaagagttgcacggatttaaacatgtcaagcatttcagcaaattcgaactaacttcactaaaatgatcattcaactcttcaagttgagtatctatcactgcataaaagatgtcaaccttaaagtgatgcagatgaataactagtcctctacgttttgctctcccttgtaatgcaaatacactttccatatcagggatatctatatcatgtttgatacaaaatgcagaagtcttctgaaatagattatctcacccattatctcttgtcttctgtaataacacttttgaaacttttacaagattcatagcattcacaatatcttgatcttttctctgaagtgcttgggacaactcatttgttattgctaagaccttgatcatcatgttcaaaaataatacaaattcaaaagtttgcatacgcatcataaggccagaggcttcagacctttttgcatgtgtaagggttgtatcatcttttataatttctagcacatcaagcacaggatcaaacaatgtacacagacttaccaatgatcggtaatgtgagctccaacgtgtgtcccctggtcatgacaaacttatttcttgattcaagtctctccctgattgaacatcatcgcttgcgatacttttgaccatctcatcaaattgtttttctctcaaaatatctgctcttttgcaagaagcactaactacattacagaccaacggtataaaagtaaagaagtcagtcaacgcgtaaaccttttttgcacaacccgctaaagctaactgaagttggtgtgcaaagcaatgaacatagtaagcaaaattattttcaactaaaatcaagcttttgagaccactaaattgtccactcatattactcgcgacataataagcttgaccacgaatctttgtcaagctcaagccatttttggcaaaaattaactcaattgtttctttaagtgaactagctgtagtatctgaaacatgaacaagaccaataaaacgttcaataatgtcaccgttgcagttcacatatcttaaaacaatggccacctgttctttaattgatatatcacaagcttcatcaactaggatagagaaaaaattatccccaatatctgaaataatagctttggtaactaaactagcagcaacattagtaatatctttttgaatcaagggagctatcattttgagattctctgggcattattcaaagatacattatttacctcttcattattttcacaaaggaattttacaagctcaacaaaattttcctgattcattgaagcatctgtctcattatgtccctggaaagccaaaccttgtcgtatgagatatcgaacacatcgaatagaaccaatcaaacgaatacaataatcctatttggctttgtcagaaatgccaaacataacaatgtcaatatgttgattttcattcatcaaatctttggcagcacttaagcacaaattatgagtgcttccaactttcccaatatgtttaatcagccgttgtttgtccttccatttgctaaatccttctacaacaaatgaatcatgaccaccccttccatcaccatgctcacaactaaatagataacaatgcaagcaaaatacaacatcttttgattcactatactccaaccaagtgccaaactcattgtaccattgaggactaaatctacgcattttacccccaaattaacgattgaggaaagttgtcaagttttgaaggaccattcgttagataaattcttcgaatcatttccctttcttgatcactctttgcaatgctcataacagaaagtcttttacccggatcaggaacatacaaatcattttcctttcttgaacactcatttggtttatcttgaactcaatcaatagatgaagaagattcatgttgcggattcggtaagtataccgatcgttccaagtaatataatgataagaaagtgtatcgttcccacgaggattgtttgaccaatgaaattataattaaatccaataggttggaagacaaatatttatgagaaattgttgttgtgtgtgtgtaacaattaaattaaacctaattatgaacattaattattatcaacaagtaaataagattataacgatatgtaaagtaatgtagctagggtaacccacactaaatgcttcctaccttcttacatgaattgtctactacctttatctattacaagttactcaatacatgcatcttcatacagtaatagctaggtcctactcccatagtggccttaaccctttaacccaattaaataccctaattccttagtagtacccgttaggttaagcattaaatgatgcattaaatgtttgcaagcatacactactatccctagacaatgtaaaacttgtcactttacccaagtccaagcatagaatcccaacattcctattgtaaaccctagctttcaatacccaactagaatgatcagttccagcaagatagaaacatatatgcaatcaaagtaaagtgaaataacttgatataaatgaagaatagcatctaatacaatccaaaggaggttacattcagtgcttagccctaactacaatatgaaatcagccaaacctcattgtggttggctgtaatacaaaaaatggcatacccaactgaagtgcaaggagaagaagatggagaagaacctcctcttgagccttcaatctcctaaaaccctagctaaggtacccaagctcataaaaccctatttttgtgtttttctccctccaaaaattcgtgcattcaatgctgaggcttcagtatttatagtcctgcttgtgaagtctctgttttgcccttggcagctttaattacacagcttttgtcgacctgtggcgctgatggcgccaacttacagagcttttggcgccaatgacatcaacctggcacgaatggcgctaggatccagagatgatggcgtgagtagcgtcgtgtctgcgttgatggcgccaaaagacagtttgttggcgctagtggcgccatattcacgctagtggcgctggactctagaattgtggagatggtggcgccaatcatggcgctggtcactccagtccttcttccaggcttgattctttctttaatttgctacttttgattgatttcctggcaatttacagtattagctcaaatcacaacataataggcaatttatcaatgtttaatgctcaatttcttgcttttgatagcttaggaaccttatatgctaggcgcatatcaattcacattgagaacgtttagcactactaccacttgactttgtaaaaaaagaatctaaatacctttccatcctaaaaaatgaaaaatgacaaaaatgaatcaatatataagtatgcatttaatttggaatcaatatactccaaaatattaacaatttgcttatcctaaagttccatgccttgtaaaacagaacaaagatttcattcggatgattcgaattaaaactatcaaggtatcatgctttccagttccaggcaaaatatttggaaatgaaagcttatattatctcttaaaaaacaaaacaaatgcaaaattgaaaacaaaacacattttcccaatcctactttcaaatgcattatggaaaatgaaacagacaaacaataatctcacaaaccccagaataatgcagttatgcacatccaaaagagaaaacctcaaaatggaaaacactcaaaattgagacaaataaaacattgtccccaatctaggttcgcccctgatgccaccacaaaagaattgctaagcaacaaagaagttattgcagtaaaccaaggcatggacagactaaattaaccttcttatcttttcttaaatagagaatgcttttaaaaccaataacttatgataatgcagatttgcagtgctcactggcactcttcacaagcctcacatcatcacatcattcacaatttcacatggaaatgttttgctttgataaatgagaaattaacataactcaaaaaataagatgcacgattcactcattcacgggaatcacgggtattgggtaatcaaaatcagtaatgggtattgggtagccattggattggagacttgtccgactttgaggctggaggagtggaggttgttcatcgctgccggtgaagatgaaagacaatggtgtcgtcgccgtctctcacggttctgattctcaacttctggtggtctctctcgatctcgcgatcgatggctacggtcttaggtgagcgactaaacagagccccgaaggtggtgccgtggtggccgatgatggcgactggcgaaggcgacgaggcgcagttctggttcgagtcttctggtggtctctctcggtctcgcagggtctgctagtgtagggcactaggactaaggaacgcgttttgctgcagaaaaaagacaaggatatttgtgtaaaaaaatttaaaatcagggacatattggtaattaactttcaaaatttaaagggggggcactgcccgccaccccaatgtttcacatacgtccgcctttgcatataggcccgtcattgaaatgttcttatggggaattagagtagattttgtaggagcaatgttagatagatacttactcctttgtagtttaggaagattaggagggatagggcattgagtactctccttataactcttgttttagaataaaagtggagatatagattgttccaattagaaatagccatttgcgagtatagttaagacttatgagaaattttaatctcatgtaggtattgcttatggtaggcactacattcagattttgggtgtgttatggctcaaaattttacggggatgcctatcttaatcacacttgtatctagtggaactaactcactgctcccgcaacatgatttgcatgcaaccttttgaatttttgttatcgtgaacttattgcacgataagacaagaggaaaagaataagacattagacggatagaaataaatacgaaataaagtaaacaagatttgttatttagatgaataaaaatataaaggaaataagtgtagaaattcattatttatgtttgttttggacaatgaaagagaaaatacaaacagatgaattgtttgaaaaaattatacattttttaaaaattattttcagtatttttctaataagattattatttttttattatataatatacttatttgatttttaatatataggcaccactaatcacttctttgtaaaaccaatctcgcctcaaactagtttgtttaaacttaaaataagtaattttaaaataaatatttttttgaataaacacttaaacaaataacgttgatcaaaataaacaaaaaaagctattttttaaacataaacacaatttaaacaaatacattaaaaaatagaaaattgtttattgttgcgtactcggcaagtgtaccggttgtacaagtaataaagtgataaagaaaagtatcgttcccacgaggattgttgaccaattaaattataaattgaatcaataagttggatgacaaataaaatggataaatttgttgttgtgtgtgtatgacaattaaattaaatacctaattataaacatgagtattatagacagactatggagggttgtaatgatatatgtggtgaagtagctaaggaaatccacactaaatgctccctacctttgtacatgtattgtctactatcttcatcaaacccaagttactcacacatgcatcttcatacaatgatagctaagccctactcccgtagtgttcttaaccctttaacccactttaatcccctatttccttagtgatattggttaggtcaagcattaaatgatgcattaaatggttgcaagcatacactcctatccctagttaatgtaaagcttgtcactttacccaagtccaagcatagagccccaatattcctattgtaaaccctagctttcagtacctaactagagtgagcagttccagagagatagaaacatgcattcaacaagataaagtgaaataacttgatattaatgaaagatagcatccaatacaatccaaaagaggttacattcaatgcttagccctaactacaataaggaactagccaaacctcattgtgggtggctgtgttacaaaataaaatggcatacctagctgaagcaaggaagaagaagatggagaaccctccacttgagccttcactctccctaaaccctagttaaggcacccaagcttcctaaaatcctacttagtgttgtttccctcctagaagtcgtgcattgaatgctgaggttcaagcatttatagtgtagcttgtgaagtccctgttttgcccttgaaaactttaattacagggcttctgtcgacttgtggtgcccttggggtgagactggcgttgatggcgccaacttgcagaatgaacgacgctcatggcgctggctgacagagaatgtggcgccccaggcgcggatactggcgctccaggtgctgaagtccagagatggtggcaccccaggggcggaattggcgctcttggcgctgaggtccagaggatatggcactcctggcgccgtgctggcgctcttggcgccaaataccagaacttgtggcgcctttagcgcagccttggcgctcttggcgccagcttccagtgcttttgacgctgatggcgccactactggcgttgatggcgctagtgccttcttccaaactttgtcattttcttctgaattttgcttgaccttggcatctttgattgatatcttggaaattcatcacattagctcaaatcatacacaaggagggcacttatccatgctttatgctcaattcttactctaaaaagcttaggaaaaccttatatgctaggcgcatatcatttattttattaaaataaatattttttcaacaaataaatttaaacaaatttaacaaaagaacatcacttgagttacgagcatgagttggaccgattagacacatattagacaattataaagaatgtttttatggttttgaatctagttggaatactaataagaaagacgtgaaactaaaattccaaagtacaattaacatgatactagctctagatactcatgcttacatgcctccgtccctgattggagatatatgaagtttatatttaatatggataagtccttggaaacacagaataatcaagggtcaatctcaaagtttggaataactataatttcttattaaaatgtcgatctaaatggttcttaacataataagagtggttgtgacatatacttgaagtttgagtttgccagagtctataaatatgtaatagacactggcaagtgttcggatggaagataaaatctagaccacaagtgtttgtcaaaaaagttaaatggaaagagaagaaatagaagtattggaaaaacctccattgaagccattgcataaaaaacccacttggaagtgtgatcaaatatcagcaacaaagataaaaagtaacacaggaaatctgacaagaataatttgttctgaaatttgacaagaatgagagtatagacgcagaaaaagtgaataatgcgattgcatttgtcaatatgctcattggttgggatcaattaatgtcaatgcataacttgattaatcttttaattaccacttcataactattacaagttaattttttaagttaagatcttaaaaataaaaagaattgacctagcttgaaccatgcaagctctctttccatttgaatggttgctctaaaactggacaatgctttgaattcaagtggcagatgagcagctaagtgcagaacgttgttaccttcattgtccactgctcctactatatgctctatctttttaagtatactaaaaaaatgcttatttttcaatatatggcagccaagtgcagtaggtttcgtccattgttggggtcccttatcatggtcactagtttactattatcgtcaagaatccaaccaagagcctcatcatttcgatatatagttgattggtccaacaaatgtataacatgagcataaagaaacaagttaaatgaaagtttggtcttatatgaaacatcaattttttgacacacataattaaataattaaataaataaataaataaataaaacaccattcgcaaccgatcatgaaagcttacttagaatttctgaaggctttcgccccagcatatgcaatgctgttaacttctctttttgcctcttcatctcttgcaacggacaaatcagttggatatttttcaaataatttccttgccacatctgttacatgataagctgttagcatatagtagtttttaggataaaataattaagaaattaaagataaaatatcaaataaaggctttaaatagatataaattatcttatcattaattttatcattaattattgttattttaatatttaggaacaataaataacagaaaagaagcaaaataaagggcaactggaaattgcagctcacgcagaccgcgccaagaccacgccaatcgcgccacactcactgcctgttgacggtgatcgcgtgaaactgatgctaaccgcgcggacgttactggaaattcaaaaataagattaaagataagataagaagataagctcttagggttttgctaacctatctataaataaagaagccacagaactcactcagacgcagagagacactcagaaacacaataaacacatgcagaggctaaagaagcgaagattgagaagaaaatcaagattacagggtttgattattattcttatttgtatttctacccaccttcttcttcatatttgtactaagctagacataattatgtctagctaattcctccttgattgtggtaaaggccaaaaatcaatgtgaactcttgtgtggattggattgatgttaatgaagattattatgattgcttctctttatcttgttcttcaattttaaattccattgatagaattgatcactctattagaggtactaagggctttaattcacaatagggatattgggattttagtttctgaaagcgataaagtgccagtttgacattacctagggatagggatgaaggattgtaaagtttttatatgtcagcttaaagcttaatccgaaagggggttactaagggattagaacacttaattaagattaaagggttaaaaagaccgaggaatctgggtttaaccaattaattaaggtgtatctttgagtacttgtagtaattgaaattaattatcaattcaattaaacaagtagggatcaaaggtgattgtgcttttaccacaattgttcttcctcactgcataactttcttgttaatttaaatataattctgttttcaatatattccaagttacatcacaaaatcacaaatcaaatttattttatttttatttcttctaattttaagataataattacaattacattagtgcttcaatcctcgtggagaagatactctacttatcaatttattacttgaacgatcgatacacttgccgtgagttacgcatcactttgtgaagcgacaagtttttggcgccgttgccggagattgagtacgccaatttaattgtaattttattttttaaaattggattttgttttactaatctgtttctttagtttatgcgaggattagcggaacctgaaactttacagtttgacccagaaacagagaagactgcaagaagaaacaagaagctagctaagcaaaaacagagagcagaaaattctaattcacaaactgcagttgaattagagatggctgaaggcaacaataaccagtcaagaccgggagatgaattaatggaggacatccttgctccattattttctaaaagatattgtcagaagggtttctgatttaggtggttctgttgtaactagtgatgatcatactgtcactaagaggtttgtggtctgattaatactcatgttactaggaacatgttttttgtgtggtgaattttatttatttattttatattaggaaagatgatgataatgacatccacgaggatcccaagagaaataacaaggtaatatatcaattcagactgagttggcttaaatttttcttttttgactaaaccttctgctgagtaattatctcttgtcatgcagactgaagcttttgctggttacaaaagaatttacttcagttattcgggaaattcacaagttgcttcactgacttgcgaatacaagtacatttaatagtatgtaaaccttactatacaaagaaccaaaactacctggttttcttaaaacttttggtgaaaactgttttgtaattgagcaaactattcactatagaatcagaattaacacataatttggaaattctagctgagagatgcaacattctaaagaacctcgcagcagcttgatgttaaatattatctgaataatgaattttttttttcttcatgatttgcacagagcctggcattgcagtggcagaggaagggggtatcaatgtcagaagagaagcatgaggaataccctgaatggtcattgtctgatatggaaaaaatgaacattgatcccatgcaactagctaattaacttaaatggaaggattgatgaagatgaagaggattatgatgaagaaatgtagatgaacctgttttggtttagaaagttctaattgagaattagagtagaatttttaggtgtagtattagacaaatccttagtggttaggaagattaggagggctaggacattgaaaactctagtccttacaacctttgttttaggataaaagtggagatatagattgttccaattagaaatagccacggtattgttatttgagaaattttaatctcatataggtcttgcctatggtaggcactacattcagatccttaaacttacggattggattttgtttcggttgttagctttgattgtggcgttgtgtatgcaagtctgttattgtatcacaccacgtttcctctcgagtacaatttgagagcaaatcggcggagcaaactcactgatccgacgacatgatttgcacttgaaccttctttgttatcttgaatttgatgagaaatcagataaatggaaaagaaataagagagataaaaataaaagtttaatatgtatatactaacactaacagtataaaacaattttatgattttacaaaccatcatctaattataaattatcattttaaaagttaacaaatttattatatatacatgataaattgtgattggatgactatgtaaatctttttaagctctcaatacataactcttatctagaaataaatacaaaataagatgaagaagatgtattatttagattaataaaaataaaaaatatataaatttttatttgtttgaataaataagagagtagaaaacaaaaatgtggttattgcaaaaatgttcatacaaataaaaaaataaaatttaatttgaaaacctgaactttttaattatttcgttatttctcaacatgaaaatattttcttataaaacaataatttgattttttaaaatttaaacataagtaaaggaacactcctaatcatttatccttctatttcacgtcacttggtgagaaatatggtttggttaggactcattaattataatttcatttctcatattctaacacattcaatcaagaatttttttattactttatttctcttcattttaattttatatttattataactttgttgtatatagtaattcttggcagatcgagtaagattaagtctcagtgaaagatgaatgcgtaataaaaaaaagggtttgtctttgttatgatttgcagtatagtctcaaattaaggcgggaacaataagaaaggtaatatttcatgagatagaaaatgtaaaataatctcaaatttaaacacaagcttcattgttccacaaacaaataataatacagtgccttaaaacttatgccaatgtctgcagctctgtaataagttagtccagtttgggccaacgataaaatctagaccagaagtgttcgttgaaaaagctaaattgaaagagaagaaacagaagtattgggaaaacccccattgaagccactgcataagaaacccacttggaagtgtgatcaaatatcaaaaaggaggctgcagtgaaagccacaaccaaagcagcaacggcgataataagtaacgcacgcccaaaagtcaagctgggatgtagtgatttcacaaattcgctttctgcgaatcttgatgaagtgaaatttgacaagaatgagagtaaagacgcaaaagaagtgaataatgcgactgcatttgtcaatatgaagacagtaaaccacgcattggtcttatcacctggaacagtcagtgcagctgcaaatgctacggtagcaacaagtgttgacacaagcatgccagattcggctattcctttggctgtttccttaatttcttcagataacttcttgtgttccttataaaatacattaattggtctcatgcccgctttgtttgtctttgttcttagttcaggaacattccgcttcactaactatttacaaatcaagagtatatgtaaatgttggtatccaaatgcataacttaaattaatctttcaattatcacttaataactagagcaaattacaacaacacctcctaagatttagagtaattacacaaatattttttgagatattagagtaagttttaaggagatgttagtgtaatattttcaaacatataaaagatgttagtgtaatttttcaaatttaaaagaaattagtgtagaaaaataaaaaatggaattacatataattatatgaaatctcaggaaaattattgtaatttcctcaaatagctattacatattaaatttgtaagtaatacaatttcaaagttaagatatttaaaaaataaattttaggggtgatatttatttttacaaatgcacttgtattatttttaattaaaatattctattatatattggctgtttaactattatgctaaagacaatggataacaaattttaaaaaattattaaaataatcaacaaatactacatacaatgatttctatttttaattaaaacttgttacttttaaagatttaaaatcagtctagttaacataagcctaaaattagtggaattttaaatttttaaaataagatagctagaactgatcgatcccatgcgagtgaataaagaatggttgaataaagaaaactaagcaaattaattgaccttgaaccattcgagctctctttgcatttgaatgtttgctcttaaactggagaattcttcgaattcaccttgtggaagacgcgcaaccaagtgtagaatgttgttacctccatagtccactgctcgtcctagaagctctgttaatccccgtggtataatattaaatattatttcttgtcgaaatagcacaaccaagtgcagtaggttccatccatttctttggtccctataagtcactaattcaggattcttgtcaatgagcatcttcacagcctcaacatctcctgattttattgcatattcacgattctgttccaatgtttcaacttgagtcaatacttctccaaatagtcgatcacaaacgtctgattccttggcaaacattattttgtgttattagaataactcaacaaacatcaaataccattattacactggatatagataattaaggactaattcttaattttttatataaaacaaaaatatatataactttctaaaatcaaaatcaaaatggaaatgatgtcaaataagatctaaattttagcttagaacacacaaaaaataaaaagccattttcaacttgtgaaaggttacctgacattcctctaggcttttcctccagcatcttcactgctgcaacgtcctcttcatttcttgtaatggccaaatcagttggataattttcaaataatcgccatgcccaatctgttatacgcacaaattaaatagtacaaggcaaggtaaataaaattaactacaactaaattgaaaaaccacgtacgagttcatatatatctccttttatatacatgaaatcaatgagaatttagctaggagctgtttggttttaaaggatgatatcacagtctttcagaaacctaatagtcataattaattatttcaactgattcaatgggttcgattcagtttgtaaaacttcataatatgtaaaaaagagaactagattacaaaaaggagaaataagtacataagagaactagattacaaaaaggagaaataaggttgtttaattagttttacacttaccaaacatgtcgaacctaatggtcatcataaacagtcgttcaatatccttcaaatcaatcagtacatcaagcaggaaatcaatgtcttctggcttcatacgcttagccaacactttcacaatttcaagaatgcctctctttaatgctagatgaataggtatgtctccacttgcgtttggtattagcacgtcttctggcctcatacgcttaaccaactcattcacaaaatcatagctggattcccttgctgctatatgaagagctgcgtctccacttgagttttctattagcatgtcttctggcctcatacggttaaccaactcattcacaatttcaagaatgcctctctttactgcttgatgaagagctgtgtctcgacttgagttttgtattagcatgtcttctggcctcatacgcttaaccaactctttcacaatttcaaggctgccgtaacctactgctagatgaagagctgtgtttccatctgagttttgtattagcatgtcttctggcctcatacgcttaaccaactctctcacaatttcacccctgccttcacttgctgctagatgaagagctgtgtctcctcttgagtttggtattagcatgtcttctggcctcatacgcttaaccaactcattcacaatttcaagactgcttttacgtgctgctacatgaagagctgtgtctccaaaatattctaacggaaagcgtaccatatcaggacatttatcaataatcgattttgattcgagccactcattcctccacatatgtctcgtcagatcttctattaaagaacctgcaatactttcaaacttcacattataacatgtcctttatataataatcataacgtacttttagtatttagttgcaaagaagacccttttaatttctcgtttacccttaatctgtaaaaattctcttggaaactcgcctcaaattttgaattcctaataatttcatcagttgtaaattgaaatctaccagagaaattcgagattacgtagtcgaagggatccaatcatcaattacctttaattaagtttgaacattgaatttcaatttgtgtttgaaaattaattctatgatgatgagtaaaagtgtttttgagagaagtcatttattttttcttttcttcagttgacaaaagctaattgatcttaacatgcgacttatttatcctcagtttaaaagtgattctacttttttttatctttcaaataaaaaataataattttctaaacccattgttgaaatatcattcgtataataatagtataaatatatttttcttaacgtcaggggtttcaaattcaattttttcaaatggtaaaaaataaacaaactcttaagacatgatctctgaaatacaccctactgtgaatgcaatagtttcaagtataacttactcagctcttctggagtcatttcattcacttctatactttcatgttttggtgccagtgagtttgttgaagtggcaattggagtttgctcatcaatttgaataggagtatgatctggtggaatctgaattatgtggtcttctgaaacttcggtagtggagttcatgatttaattctagggaaaatgaagtgatttggatacctctctaaaattccctgtgttacttctttctttccagcctgagaagcttaacatattatatatggtggtaaaacaagagcccttaattaattatttttccaacttgcacttaaaataactatttccgatgtgacattttgtggattatagctatgttaattgaatctgttcaacatttcaaccccacagttttcaaaagctttttaagttgaatgatttctaaatttatataatattaattcatttttaaagtgaataagtatattcattaaatttgttaacagaaaaaaatattcattataaaaaaaaatatattcattaaattgtgtggattagcgagactcgctatcaagacaccatgttaattaacttactctcaatttaaaattatatttcttcgttgtacaatgatatgatatctttacacacctaaaaccttcgatttcctactcttatattgttgacgaaaactttctgccatagcggtggttatatatttatccaacttccgttgacgcatttaattatatgattatatcctaactctggtctttttatactagttataatcaattactccaacaaccattgaactcaaagctaagactagatgcattttattatcggaatatgtataaatttattaaactcactccaacaaccattgaattcaaagcaagactaaaagatagttacccacnnnnnnnnnnnnnnnnnnnnnnnnnnnnnnnnnnnnnnnnnnnnnnnnnnnnnnnnnnnnnnnnnnnnnnnnnnnnnnnnnnnnnnnnnnnnnnnnnnnnnnnnnnnnnnnnnnnnnnnnnnnnnnnnnnnnnnnnnnnnnnnnnnnnnnnnnnnnnnnnnnnnnnnnnnnnnnnnnnnnnnnnnnnnnnnnnnnnnnnnnnnnnnnnnnnnnnnnnnnnnnnnnnnnnnnnnnnnnnnnnnnnnnnnnnnnnnnnnnnnnnnnngttggtaattgttgttatgatatttttttatgtatgttttttttattaatgataacatacaaaaggtaacggattgatgatattgaataggagtatgatctggggttggtataaactgaattatgtggtcatctgtaacttcgatgttggagttcatgatttaattctatggaaaatgaagtgaattggatatctctatgaaattccctgttcgatcagtgttgcttctttctttccagcctgcgaagcttgaacatattatatacgatggtaaaacaatagcccttaattagttttccaacttgcacttaaaataattattcccaatatttttcttccttgtacaatgatataatatctaaatattttcagtgttagatcttgaatttaagatttgatttttattaaattttttaataaataaggtgaacatatcttcaatataaagaatgaattcttggagaagaattctaaagatgcactatatatatgttaaaaaaagaatagtttttttttttcgtttatctcccctagctaagatcttaaaatgagatctatcattaaataaaaaatggaagagatcttgagagattttcaatcttccatgacaatatggagtccaccaaaaagtgatctaagatccaaatttggcatgtatcactaaagatgaacaatgatattaaattcaagatctggtcttcactagatttttcaataaaggagataaacacatattcaacatgaagaatgaatttttgtagaataatccttaagatctacacaatattcaaaaaataataattttttcttctctctccctaatatttcaaaatgagatttaccactaaagaaaagaataaaaaagatattaagagatattcagtcttacttgacactatagggtctactaagaagtggtctaagatcccaatttgagatctaccactaaagatgtaagcatctttagtgttagatcttaagcaatgatcttgagttcaagatttgatcttcactagatctctcaataatagaagtgaacagatctctaagcatgaagaatgagttcttataaaataacctcgaagatatgtacagtattcaaaaaagaataatcttttatcctctattttcctctcctaagatttaaaaatgagaattactattaaagaaaaaaatagaagagatctccataaatatttaatcctatgtgatactatagggttcaccaaaaagtgacataagaacatctttagtggtagatcccaaattgagatctttagaccactttttggtagacccataatgccatatgattaaatatttcttacattttttttttagtaataaatctcatcttgagatatcaagaagagagatgaaaaaattattcttttttaaatattgtgtatgtcttaagggtttttttataataattnnnnnnnnnnnnnnnnnnnnnnnnnnnnnnnnnnnnnnnnnnnnnnnnnnnnnnnnnnnnnnnnnnnnnnnnnnnnnnnnnnnnnnnnnnnnnnnnnnnnnnnnnnnnnnnnnnnnnnnnnnnnnnnnnnnnnnnnnnnnnnnnnnnnnnnnnnnnnnnnnnnnnnnnnnnnnnnnnnnnnnnnnnnnnnnnnnnnnnnnnnnnnnnnnnnnnnnnnnnnnnnnnnnnnnnnnnnnnnnnnnnnnnnnnnnnnnnnnnnnnnnnnnnnnnnnnnnnnnnnnnnnnnnnnnnnnnnnnnnnnnnnnnnnnnnnnnnnnnnnnnnnnnnnnnnnnnnnnnnnnnnnnnnnnnnnnnnnnnnnnnnnnnnnnnnnnnnnnnnnnaaatctactgttaaatatgtttattgttgacgaaaactttcttccatagttgtaattatatatttattatatattttccttccctaagattttaaaatgagatttactattaaaaaaaaatagaagagatctccatgaatatttaatcttacgtgatattatggggtcgaccaaaaagtgacataagaacatctttagtcatagatcccaaattgagatctttaaaccactttttggtagacccatagtgccatatgcttaattatatcttttacatttttttcttgagtgataaatctcatcttgagatatcaagaagagagatgaaaaaaattatttttttaaatattgtgtatgtcttgaagattcttttataataattcattcgttaggttgaaaatctatttactttttttattagaaaatttaataaagatcatatttgaactcaaaattcttgtttaaaatcttacattaaaaatattgtaagatctcaattaaaaacctattaaatatgtttattgttgacgaaaactttttgtcatagctgtggttatatatttattatatatttatctaccttcccttgacgcatttaattctttgattatatcctaactctggtctttttatactagttatagtcaactatgccaacaaccattgaattacaagatgcattttattattggaaaatgtatgaattttattaaacccactacaacaaccattgaattcaacgcaacactagaaaaatatttatttaatattttggtgaaatttattcagccattcatattaataattatttttgacattttaatccttttatgttaagtaacataaatttttttattaataataacaaacaaaaattaacaaataaataaatttatcatattttttctttcaataatttaaatttaaatttttatatttaaaaaataaatttatcaataaattacacatttaaaaacaaaaataattatttatccaacacatttttataaaatttagaaagagtcaggctataacaggagaggagagtgtaatcaatcacttattatgagaaagtattttatgaccatcagattaacttgtttaaaaatcaatgattgtaaacttttattcttttattataatcttttcttttttgtcgtcctctttcccgtattacccttttcctctcttcgtcttagcggcaacgatggtgccatgacagctggtgatagtggggatgttaatgcgtcattgcctggccgttgtgaagagtaaactggagagatcttgagagggtctttcgccgcttttcttgtggtgttctgcaacaagatttcaatcggagaaaaagcatggaagacgaaatagtcacaaagctttatataactattgcctcatttaaacccaaattggattcaattgaccagatattagtctcccaaagttttgagctttttgatatttgttgtgtacgtgtttattttttctcataggtgccaactgccaagttacgagtttgtttattgcataagcgttgtttctataccattttactctcaattttgagtccaatttgggagaataaaagacctaagattttggttttgaaaatcagatgacattttttatgacgatttgtgattatatttgaaattgcagtttcaaggaaattattgtaccattgatctgtaatatttacaatctggcagtgttttctatgttcagatatgtgatgggtggtggtgcttggtggtggctccgccgccgtagtgatcatctgtggatgtggagtagggaaaaaggaggaaaagtaggggttgccgaaaattgctttctgcttaggtgtcgttgtcggagacaagaaaaatagaagaagaaaggcaaaagaaatgaaatgttgccgtcagaggtgatttttggcaacgacgcatagtggttaacgacaatagtgatgaataagttagagggataaattaggaaactcaagaagaaaaggaaaaaaataaagaaaaaagaagaaaaaaattcatccatgggtttgaaatttgataaatctaatggtgaaaatttactttaccattatgggagacctattgcactctctcacgctagtgtgtgtcagaatagggattaaattgtacattatgaaagatttaagactaaaaataatattcaaagaaagtacaaagtctaaacatatattttaaccaaaatattagttgtttgacagttgacaccgtgtttcatactaaattatcccatgtgcaagatgtaactatatatataagatttaggatttaaatcaaggataataagaaccctaaatcctaaattataaaccacatggaaagaaaaagactttgacaaggtgtatgtgtagtttacgaaaaagataatatgaattaattataatgtgtttgaattttggctttaaaattatgaatgaacataatgacatgagtcaaacttgattttatctaaaactagttaaatgattcatgacttgcacagtagtaattttacaatttataatttcttacaatattataactttttaagataacatttatttttattattattgtcattataataaatattatgacaatttaataaaacaacgataataaaaaattatcataattattacaaaacatattagtgttaattaaattataatccatattatctcatgtatcaattattttttctattaaaagattcctaattaaataagagagaaatcatattaatatatatatttagaagagagagaaacattaataataataatatttttgaaaacannnnnnnnnnnnnnnnnnnnnnnnnnnnnnnnnnnnnnnnnnnnnnnnnnnnnnnnnnnnnnnnnnnnnnnnnnnnnnnnnnnnnnnnnnnnnnnnnnnnnnnnnnnnnnnnnnnnnnnnnnnnnnnnnnnnnnnnnnnnnnnnnnnnnnnnnnnnnnnnnnnnnnnnnnnnnnnnnnnnnnnnnnnnnnnnnnnnnnnnnnnnnnnnnnnnnnnnnnnnnnnnnnnnnnnnnnnnnnnnnnnnnnnnnnnnnnnnnnnnnnnnnnnnnnnnnnnnnnnnnnnnnnnnnnnnnnnnnnnnnnnnnnnnnnnnnnnnnnnnnnnnnnnnnnnnnnnnnnnnnnnnnnnnnnnnnnnnnnnnnnnnnnnnnnnnnnnnnnnnnnnnnnnnnnnnnnnnnnnnnnnnnnnnnnnnnnnnnnnnnnnnnnnnnnnnnnnnnnnnnnnnnnnnnnnnnnnnnnnnnnnnnnnnnnnnnnnnnnnnnnnnnnnnnnnnnnnnnnnnnnnnnnnnnnnnnnnnnnnnnnnnnnnnnnnnnnnnnnnnnnnnnnnnnnnnnnnnnnnnnnnnnnnnnnnnnnnnnnnnnnnnnnnnnnnnnnnnnnnnnnnnnnnnnnnnnnnnnnnnnnnnnnnnnnnnnnnnnnnnnnnnnnnnnnnnnnnnnnnnnnnnnnnnnnnnnnnnnnnnnnnnnnnnnnnnnnnnnnnnnnnnnnnnnnnnnnnnnnnnnnnnnnnnnnnnnnnnnnnnnnnnnnnnnnnnnnnnnnnnnnnnnnnnnnnnnnnnnnnnnnnnnnnnnnnnnnnnnnnnnnnnnnnnnnnnnnnnnnnnnnnnnnnnnnnnnnnnnnnnnnnnnnnnnnnnnnnnnnnnnnnnnnnnnnnnnnnnnnnnnnnnnnnnnnnnnnnnnnnnnnnnnnnnnnnnnnnnnnnnnnnnnnnnnnnnnnnnnnnnnnnnnnnnnnnnnnnnnnnnnnnnnnnnnnnnnnnnnnnnnnnnnnnnnnnnnnnnnnnnnnnaaaaacataattaaaattcttcctatatttatggattctaattgttatattttttttattgaatgcattttatctaacttatttttgtactcgtaaccataatagtgtgataaatcattttaaaaaaggaaatattatatttcagtttaattattggtagatttgggtttaattatatatatatatatatatatatatatatatatcaaaataactatttgtaatagaaaatcagtgtatgtagacattcaaatccattttgatcattacaccatcaaaaccaatttaattcaaacaacagtctctcttaataaatccattttcagatgttgatggagtatggtttgaccctccgaagtattttagtaatcttttcatcaacgatattttagagtgaatgttatggtgctaatgagattggggtgtcaatagaattgagaggtgaatcccattaactagactttgctccccgtttcttaaaaaaatcatttttaataactattatccaaacaaaaattacattattatataatcaattctaaccataattaattatgtaaaatcattttggtgcccgcctttaagcatattctacaatcatcttctatttccaaatcgacattgcttagttttccatctccttcaatcatcttcttgccttgacttgaaccatctacctatagttgttggagagcaacaacaaacaagtgtcaattacaaacattggcaaactgcaaacctatacaaaagcagaaaaagaactgaacaaaaacaattttcttgaatgaatcaacagcttaatattaattaaatatccatccaagagcttattttgaaacttttatacattatgatgcccgagtaaatacataaaattaagcttttcacaaccattaaatccattcacaaatcatggctacatctttgaaaattggattacgtgttttttcaattgtatgtgcctgtttgctcttctattttctccgtatagactacgaatgttacagtagaacatgagtagcaatatagagaaaaataaatgcaaactaactaaatgataggataaaacacacaagagagatcaaatttaaggtattgtgtttgtttgaggaagatattcgcacacgaggttgaaaccagtattagaaaaatcatcttcaaattggacaattcaactactgaactgctcaaataacttgtttgaatgtctcatcagtaggctattggattgatttgcaattggttagtagactatcttttagtttctctctgatcacaaactcttttttagcttagcaaaacttgaaactaattcttttaaactaattttggtttagtttggttcacaggaacaatttggtgcaatctctctgttttcgattcaaagcccaagtatagaatcaaagcccaaagcccaagtatatgcacttgtgtgaattttccatgcctttctttaatttgctgacataaggggattagagcttatcattagcaaaaaagggtttatcgtccgaggaattgaagtttagctaaataagagaaattgaatcacataatcaagacgaccaagagattatcttagggtggaatcaagggaatttcaacacctaactatttttattaattgatttttctagtacattcaattataatgtttctttcaatcaaattaaaaaaagtctaaaaattcctaattgtttatctcttaaatcaaaagagtaatcgataatttgattgattgtatatttgataaaccaaatttttcattgatacaataatttgtccttattttatcaattgtacaactagtacacttgtcgtattctaaccaaactccaacaatgtattggtaaaaggtgactcagttgatctttaagtcactttacgtgaagtccacattgcccacattaggattagtgttagaaaacattacagttcagagtaaagctttcaatttaatttccatataactaaacgtgatgggaataaagtaagtagaaccgtagaaatatagatgacacaatttgtttgatgttaattaatgtaaatgtactttctcttgatattcaataaatatgcatgttgtcatcgttaaaaaataaaaagataagctattttttagtttctaaattttttaaatttatctttttagtctttgaattttttatttatatttttcatctcttattaaattggatgatgcattcctgtgtttatcaatttattcgatctaaattcctctatggatattaatgaaaaaagaggtccttgactgcttgggcaagtcctcgcgagggaactttatttgttgaagtatgtatttcatttttgtttgcttggaactataataacatatccgtagagatagtctcacaattgatttttaaggcagcatggcacttcgatcaccaaaggttcattccattgatagagtcatcacaccctcaaatacactctttttatcccactctctttcattgctccatctcatcttattttttaacttcgtcctcattgatcctcactcaacctctttgccaatgaataaaataaaggggcaagttacttgaaaggcatagggatggactgtttttggttcttaaacatataaataataaaataaaataaaaacttattaagtgtcataacctaaattttagttttagacattttagtaatgattgtgtaatcttattgaattgattattggcaggctaggatttaagaaaattatgcaagctgacgaggatgtagggaagattgcagtggctgtgcctcttctagtttgtaagtagtctttctctttcatgcatattctagggtgttttcttcttctcttgaaaaatgatttttttttggtttttttttttgtgcttttggaagtttctatgaattatctctgattaataattatttgtgtttatgtattgcagctaaagcactagagctatttctgcaacatttgtgtgatcgaacatatgagataactttgaggagggaggcaaagactatgaatgcttttcatttgtaagtgaagtttatattattttcttggttcaaatttgtgtctatgtcaagtctgttcaaggtggttaccaggctgcaggtttctttcttttggagggcggttattactatgtacttataagaacatcagatctgcaattctaatgataatgtgctcagtctcaaacaatttccctcttgtgccttctatttatcgcatgcacaaacatgattagacatgtaaatgacatctgcagaagcaaatgttgggatgctcttgcttttggaacatgtgctgtttgttctagtatttaccttcactttccagtttctaaaatgtcccgagttacttgcgcccttgcctttgcagaaaacagtgtgtgcagacttttaatatctttgattttctgaaagatattgtcagcaaagttcctgatttaggctgttctgttgaaactagtgatgaccatgctgtcactaagaggagatttgtgctctggttaatactcgttacttggaacaagttttcagtatgctgaactttgtttactttatattaggaaagtttccggagatgatgaaaatgacagcgacgaggagctcaagagaaaaaagaaggtaatttatcaactgtattcaattacttcaacagtggttaccttaaatttttcctgtgtgattaaaccttttgctgagtaattatctcttgtccatgcacactgtgaacctttcgctggatacaaaaaaatttacttcagtcaatagggaaaactcactagtggcttgtgaatgcacgtttgtctaaatgtctaatagtctgtgaggctaggccacacttcaacttaaagcttactacacaaagcgccaaaactgtctggttttctgaatacttttgctgaaaactatagaattggcactaattattaaatattatctgacttatggcagcctggacataagagtggcagaggaaggggtaggggcagaggtaggggttgtggccgtggaattagaactgtagatcaaaagatgagttcacatgccaagtgtgaagatgattctgatgtattgaagcagaatgacaaccacactcaaagcaatgaaagcatggaaaatgtgccggaacctgaagaagttaagcagagttttccagtaagcaaaccggctgaagtgtccattcgaaattttgacttaaatttgaacccagatgaggatatggattcattagacacaccaacttctgtcccaactagttcatctgcaaaatcagtgtcagaagagaagcatgaggaataccctggatggtccttgtctgaaatggaaaaaatgaccattgatcccattcaactagcgaacatagaaaaaaaaacgatgaatctatcttcattctagtgtaatagtttcctcaaaaaggaacaactggaccaggatttttccttgtctgcctacgtacccccaatggaaggattgatgaagatgaagaggattatgatgaagaaatgtagatgaacctatgttggtttattcattacttctcatgtaggcccgtcattagaatgtttttatggggaattagagtagattttgtaggagcagtgttagatagatacttatccttagtagtttaggaagattaggagggatagggtattgaatactctccttataacccttgttttaggttaaaagtggagatatagattgttccaatcagaaatagcgatttgccagtatagttatgaattatgagaaattttaatctcatgtaggtattgcttatggtaggcactacattcagattttgggtgtgttatggctcaaaattttacggggatgcctacttaatcacacttgtatctagcggaactaactcactgctccagcaaatgatttgcatgcaaccttttgaatttttgtcatcgtgaacttattgcacgatgagacaagaggaaaagaataagacgttagacggatagaaatagaaaggaaataaaaaagatttgtaatttagatgaataaaaatagaaaggaaataagtgtagtaattttaaaataaatatttttctaacgttgatcaaaataaacaaaaaaagctgatttttaaacataaacacaatttaaacaaatacattaaaaaacagaaaattgtttattttattaaaataaatattttttcaacaaataaatttaaacaaatttaacaaaagaacatcacctgagttacgagcgtgagttgggctaagtagacacatataagtttgagtttgccagtgtctataactatgtaatagacactggcaagtgttcggatggaagacgaaatctagtgtttgtcaaaaaagtatggaaagagaagaaatagaagtattggaaaaacctccattaatgaagccactgcataaaaaacccacttggaagtgtgatcaaatatcagcaacggagataaaaagtaacacaggctgcagtaaactcgctttctgcaaatcttgatgaagtgaaatttgacaagaatgagagtatatacgcagaagaagtcaataactattacaagttaattttttttaagttgatattaaaaataaaaggaattgacctagcttgaaccatgcgagctctctttgcatttgaatggttactctaaaactggacaatgctttgaattcaagtggcagatgagcagttaagtatagaacgttgttaccttcattgtccactgctctactatatgctctatcttttttttaagtatactaaaaaaatgcttatatttcgatatagggcagccaagtgcagtaggttccgtccattattgttgggggtcccttatcatggtcactagtttattattatcgtcaagaatccaactaagagcctcatcatttcgatatatagtggattggtccaacaaataatgtataacatgagcataaagaaacaagtaaaattaaagtttggtcttatatgaaacatcaattttttgacacacataattaaataaataaataaaacaccattcgcaaccgatcatgaaagcttacttagaatttctgaaggctttcgccccagcatatgcaatgctgttaacttctctttttgcctcttcatctcttgcaatggccaaatcagttggatatttttcaaataatttcattgccacatctgttacatgcacaaattcaatagcgatggtgtattgcatatgtacaaggcaaggtaaaattgaaaaaccacgtacgagttcaactagataaaaaaaaggatgtttggttttacattcaccaaacatgttgctgctaatggtcataaaaaaagtcgttgaatatccttataaaccattttgtgaagcagatcctcagaggacaaaatttgcaccattttgttgcggccatataaaacagccaagtttggtatttttggataccaagtaatcatacaacaatcaagataggagaatgagaaaaaaatgaaagagaaaataacacatagagtttaccctgatttatctaatgtgggccacgtcaagctattacctatattttcttacacattcgaataaattaaaacactcagattacaagaaaatatataggcttaaaaatcttaagtaccgtaactattcatggacccaagtccaaactacaaataataaaacacaaaacttagtgtgagccataccgaacaagtatcagcctagaatgatttgttatgcaattctactaataatgtgctcagtctcattaaatttccctcttttgccttctatttctcacatgcacaaacatgattacgtctttatcatcggaaggaggtaattgttttttgttattacctaggactattttaaataattaggttaaaaaagttatttataatttttttaaattatcatttaaaaataacgtaaaaaaaatataaaaagtaaaaaatgtaaagnnnnnnnnnnnnnnnnnnnnnnnnnnnnnnnnnnnnnnnnnnnnnnnnnnnnnnnnnnnnnnnnnnnnnnnnnnnnnnnnnnnnnnnnnnnnnnnnnnnnnnnnnnnnnnnnnnnnnnnnnnnnnnnnnnnnnnnnnnnnnnnnnnnnnnnnnnnnnnnnnnnnnnnnnnnnnnnnnnnnnnnnnnnnnnnnnnaatcgtaaaaaaatttacgtctttaaagtcgtatgttaaaaaaaattatattgaagtcgtataattttttatgacttcagtttaaaaaaattaaaaaatatataagtcgtaacctttgttacgacttacggtatatctatttctagtaaaaaaattataatctactcccaaataataataacaaaaaataattacccacttcctgtgataaaacccatgattagatgtgtaaatgacatctacatctacagaagaaaattaaatgttgggatggtcttggttttggaacatgtgttgtttgttctagtgtttaccttcactttctagtttctaaaatgtttgagttacttgcatccttgcctttgcagaaaacagtgagtgcagacttttaatgtctttgattttctaaaagatattgtcagaagggtttctaatttaggtggttctgttgtaactggtgatgatcatactgtcactaagaggtttgtgctctgattaatactcatgttactaggaacatgttttctgtgtggtgaattttgtttatttattttatattaggaaagaggatgataatgacagtcacgaggaccccaagagaaataacaaggtaatatatcaattcagactggaattggcttaaatttttcttttgtgactaaaccttctgctgagtaattatgtcttgtcaatgcagactgtgaaccttttgctttacaaaagaatttgcttcagtcattggggaaattcacaagttgcttcagtgacttgcgaatacaagtacatttaatactctgtaaaccttactatacaaagaaccaaaactatctggttttcttaaaacttttggtgaaaactgttgttgtaattgagcaaactattcacaatagaatcagaactaacacataatgtggaaattctagctgagagatgcaacattctaaagaacctcgcagcagcttgatgttaaatattatctgaataatgaaaattttttttcttcatgatttacacagagcctggcattgcagtggcagaggaagggggtatctgttggataatttccgtttttagttgatggagatatctttttatttgataagatataatattgttatttgataagatatcttctgtttgatttgataagatattatttgatcaaataatatttgatggtttaggcccaacccatttcatcctataaatagatgagtaagggtggaggcaaaacacacagaaatttgagagcctcaagtgacagtcttgagtgccatatttgagcaagctaccgtgcttgtatatttgagagcttagagtgaaacactgtgagcgtttgagtgaccaccattgttggagaggttgagtgtaccaccacattggtgtgtttttgatgcattgtaacccatatttgttatagtggattttgatactggactaggtcccgtgactttttcttttctcacattgaggaaggttttctcacgtaaaacagattgattgtctctctcgctcctctttttattttattccgcttccgcactttgatatttgagggtccgagattacccaacagtggtatcagagcccaggttcgagggttctgaaggagccgagatggagaccagtggcataactcatgacagagatatgttcaagttgaccgcagataacttcaactattggaggtcgatgatggaggatcatcttatctgcaaggatttatatgatcccattacccttgaagtgaagccgaccgggaagtcagacaaggagtgggagatcctgagtcggaaggccgtggccacgatcaggaaatatatcgacaaaagcctctttgagcacgtgtctgagttcacaaacgcgtacgaattgtggaacaagttagaatccatgattcagaagaagactcccaggaacaaagcacacctgattcgccggcttgtgaagctagaatacaaggacggcacgagtatgattgagcacctcaacacctacaaaggtattttgaatcaactgtccaaagccaacatgaagattgatgacgagatgcaggctttgctgttgctgagttcgctaccggaaagttgggatactttggtggtgactttgagcaactcggttccagaaggaaaactgacgatggatgccgtgacagacagcctcctgaatgaaaaagccaggagaagagaacgaggtgtatccagcacgtttgaggctaacgttgctgaaaacagaggaaagactgacttccggggtcgtgacaagagccggggtggacgagacaagtccagaggccggtctaagtccaagcatgatttgaagtgcttctactgtgggaaggtaggacacaagaagccggactgcaggactctgcagaatgatgaacagaacggctgtgtgaagccggatcagattgttcccagaagaagaagtgattagagcaccacggcagtggctgctaacccgaataccgagatattcctccttagtgaggaaatgttgaacatagcccatgatgactgcacttggattgttgactccggtgcctcgttccacgtcaccccacatgagggattcttctccgcttacagaaagggagattatggtgtcgtgaagatgggaaatcaggtgaccagcaggattgttggtgttggtgatgtaatccttaccactgacacagggtgtcgggttacgctgaagaatgtaaggcatgtacctgacatgcgtttgaatttgatctcggttggaaaactagatgatgccgggtcagtaaattactttggagaaagtagatggaagctgaccaagggaagcttagtcgtggcccgaggaaagaaagaaggctccttgtatgtcatgcaaggaaagaccaatggcggagaagccaattctgtccgagatgaaccgagcttggagctgtggcacaagcgcctcggccacatgagcgagaaaggactccagattttggagaagaaacaactactgactgggttgaagggtcaagtgctggagagttgcacgcactgtctagctggaaagcagcaccgagtttcgtttgtgaaatcggatcaatccagacgatgcaagaatatccttgatctcgtccatactgatgtttgctccatgtccgagagatcactcggtggagctcagtactttatttcttttattgatgatcactcccgcaaagtgtgggtttatcttctgaagacaaaagaccaggtactccaatctttcaaagaatttcacgctatggtggaaagggagactggcatgaagttgaaagttgttcgttctgataatggtggtgagtattgcgatccctttgatgcttactgtagagaagccgggatccgacttgagaagacgccccccaagactccacaattgaatggactggctgagaggatgaaccagactattgaagagaaggtccgaagtatgttgtccaatgccgcgttgccgaaaacattctggggagaagccgtcagagctgcagttgatttgatcaacctctcaccatcacgaccgcttgaaggagaagttccagaggaagtctggacgggtcgaagagcaacttatgatcacctgagggtgtttggatgccgagctttcgtacatatctccaaagatgaaagggcaaagctcgatgcgaagacaaaggaatgcatctacctcggttcgctgaaaatcgagtttgggttcagactgtgggatcctatcaagaaaaagatagtgagaagccgagatgtgatttttcatgaagatgagacacttcatgacatctcgaagcgccaagcccgggttactgtcagacgtgaagaacccggcccttctgaccgagatgaagaacccgtccctcttgtgcaaactgaagcagggggagaaactgaagatgatgctgatgaagaccgggatactgatgtccgaattgatgagaaccgagatgaagatgaagaaccggattctcaagcggctgatgaagaacagccaagataccccactagagaaaaaagaccttctatgaggtacccacctgatgaatacaccgtcattgctgaagatggtgagcctcagagttatgatgaggccataacgagctcggagaaagaagagtggaagaaggcaatgcaggacgagatgaattccttgcatgaaaaccagacttatgagttgaccgagctgcctaaagggagacgagctctgaagaacaagtgggtgtataagatcaagcaggaagagaatgggcagaagccaagatataaagcccggattgtagtgaaaggctgcaatcagaagaaggggattgattttgaagaaatcttctctcctgttgtgaagatgacctcggtccggactgtgttagctatggcagctacaatggacctcgaggtagaacagatgtgaaaaccgcattccttcacggtgagttggaggaggagatatatatggagcaacttgaagggttccgagctccaggatgcgacggcatagtatgccgattgaagaagagtctctatggcttgaagcaagcacctcggcagtggtacaggaagtttgattccttcatgacagaacataagttcatgaagacggaggccgaccactgtgtatttgtgaagaggtatgagaatggagactttctgatccttttgttatatgttgacgatatgctgattgtagggcaaaacaaagagaagattgccgccttgaagaaggcattgagctcatccttcgctatgaaggatctcggccctgcaagacagattctcggaatgaagatcatccgggatagaactaagaagctactgtggctaagtcaagagaagtatattgagaagatcttgaagagattcagcatggacaaagccaagacagttagcacccccttggccgggcacatgaagctgagtaagaagcagtgttcgagatctgatgaagacagagaagagatgctgaagatcccataccaatccgccgtcggaagtttgatgtatgcaatggtttgcacaagaccagacctggcgtttgcagttggaatggtgagccggtttctttcagaccccggcagagagcactgggaagcagtgaagtggatcttcaggtacttgaaaggaacatccgacttttgtctccgatttggagatggtgaagccgagctgcaaggatactcagatgccgatttagggggagattccgactcgaggaagtcgacgactggatatttgatgagatttgctggaggagcaatctcttggcaatcaaaattgcagaagtgtgtggcactttcaacgacagaggccgagtacattgccgtgaccgaggcaagcaaggagatgctgtggatgaagaagttcctcatggaactcggccatgaacagaataagtacgagctgatgtgtgacaaccagagcgcaattcatcttgcgaagaactcgacctatcactcccgcaccaaacatattgatgtgagatatcactggatccgggatgtggtggaagctggacagctcgcacttggcaaagtgcacactgatttgaactgatccgatatgatgagcaagccggtaccagcatgaaaatttgaaatttgctgtgaaggagccgggctgatgaattcgacacattgaaagccgagaaagaaggtcgggttgtttaaagttgaagaccccggtctcactgaaaaacggaagtgggagatttgttggataatttccatttttagttgatggagatatctttttatttgataagatataatattgttatttgataagatatcttctgtttgatttgataagatattatttgatggtttaggcccagcccatttcatcctataaatagatgagtaagggtggtggcaaaacacacagaaatttgagagcctcaagtgacaatcttgagtgtcatatttgagcaagctaccgtgcttgtatatttgagagcttagagtgaaacactgtgagcgtttgagtgaccaccattgttggagaggttgagtgtaccaccacattggtgtgtttttgattcattgtaacccatatttgttatagtggattttgatactggactaggtcccgtgagtttttcttttctcacattgaggaagattttctcacataaaacagattgattgtctctctcgctcctcttttgattttattccgcttccgcactttgatatttgagggtccgagattacccaacagtatcaatgtcagaagagaagcatgaggaataccctgaatggtcattgtctgatatggaaaaaatgaacattgattccatgcaactagctaattaacttaaatggaaggattgatgaagatgaagaggattatgatgaagaaatgtagatgaacctattttagtttagaaagttctaatcgagaattaaagtagaatttttaggggcagtattagacaaatccttagtggttaggaagattaggagggataggacattgaaaactttagtccttacaacctttgttttaggataaaagtggagatatagattgttcgaattagaaatagccacggtattgttatttgagaaattttaatctcatataggtcttgcctatggtaggcactacattcaaatccttaaacttacggattttgattttgtttgggttgttagctttgattgtggcgttgttgtgtatgcaagtctgttattgtatcacacgacgtttcctctcgagtacaatttgagagcaaatcagtggagcaaactcactgattcgacgacatgatttgcacttgaaccttctttgttatcttgaatttgatgagaaatcagataaatggaaaagaaataagagagatagaaataaaagtttaatatctatgcataacacagttttaggattttataaattatcttattattttaaaagtcaacaaatctattatatatggagttgtgattggatgattatataaatttttttaattctaaatgcataactcttttctagaaataaacacaaaataagatgaaaaggatgcattatatagatgaatagaaataacaacaaaaaaatgtaaatttttatttgtttgaataaataagagagtagaaaacaaaaatatggtcattgcaaaaatgttcatacaaataaaaaatcaaatttaatttgaaaaccctgaactttttatttcattatttctcaacataaaaatattgttaaaaataattatgtgatttttttaaatttaaacataaataaaagaacactgctaaccatttctccctccatttgacgtctcttagtgagaaatatggtttggttaggactcattaattataatttcatttctcattttctaacacattcaatcaagaatatttttttattacttatttctcttcattttaattttatacttattataattttgttgtatataataattctttttaaattgattaagattaagtctaaatgaaagatgaatgtgtaacaaataaagctttttctgtgatatgatttgctcccttcaccaatccacatggaaggaaggggaaaagctttgacgtgggttatgcagcatagtctcaaattaaggtgggaacaacaagaagaaaggtaatatttcatgagatagaaaatgtagaataatctcaaatttaaacacaagcttcattgttccacaaacaaataataatacagtgccttaaagttatgccaatgtctgtaactctgtaataagtaagtcctgtttggacaaacgatattatctagaccacaagtgtttgtcgcaaaagttaaattgaaagagaagaaacaaaagtattgggaaaatccccattgaagccactgcataagaaacccacttggaagtgtgatcaaatatcagaaaggaggctgcagtgaaagccacaaccatagcagcaacagcgataataagtaacgcacgcccaaaagtcaagctgggatgtagtgatttcacaaattcgctttctgcgaatcttgatgaagtgaaatttgacaagaatgagagtaaagacgcagaagaagcgaataatgcgactgcatttgtcaatatgaagacagtaaaccaggcattggtcttatcacctggaacagtcagagcagccgcaaatgctactgtagcaacaagtgctgccacgtattaattatcctatattaactaagtttgttaggataactaaatatgttagagcagattaattttctgttatggttattatcataagtttgttagagtagattatctttatatcataatgactgcaacttctgctatcataagtttgttagagtagattatctttctattatatgataataactgcagcttctgctatgataattataaatactgcagcatgcttgtattcaacgtgtgtgaataaacatattctttcattagcctttttctttatgttcatgacctcagttcaattgtttggtagcgcagcagagctcttcaattgaagagctctgctgcgctactctcctctgttgatttctatttttctttttccaaaatgagtgaacaacaagatgaatctctcagtgttcatagcccatattacctacatcctagtgaaaatccggcaattgcactagtttcgcctctactggactcaacaaattacaattcttggagcagatcggttctcacagccttgagtgcgaaaaacaaggtagaatttgtggatggttcccttcctcaaccagcttcgaatcatagattaaacacagcctggaaaagagcaaacaacatggtggtttcatggctggtacactcagttacaacctccattcgtcaaagcatattatggatggacaacgcatctgacatatggaaagatttgaaagcccgatattcacaaggtgatttgcttcgaatttctgatttacaacacaatttagcttcaattaaacaaggagacatgaatattactgattactttacaaagcttagaataatttgggatgaacttgagagttatcgaccagatgttgtgtgtacatgtacttctaaatgtcattgtgatgctcttgttgaaataaagaaaaggaaagatcaagatagaataatggagtttatgcgtggtcttaatgatcaatacaaccatgttaaatcaagcatactaatgatggatcccttgccaccaattaataaagttttctcttatataactcaacaagaaaaacaatttgccagttctaatgctcttgacaatctgagtttgatcaatgctgttgttaatacaagatattcttgtagctactgtggtaaaaataatcacacagtagaaacatgttataagaaaaatggtttcccacctaattttttttccaacaatggaaataaaggagatggaggtagaagttttagtaaaggagggacaacaggtagaaataacaatggtaaagtttgcacttattgtggcattgctaatcatacagtggatgaatgctacaagaagcatggttatccacctggtcacaaatactataaacctccaggagtttcagtcaacaaaatccaaggaatttcagtcaacaatactgttaaggaagcagaaaatacttcaaattcagagattggtgataatggtcaagatattaaaatcactcagcaacaatatcaagcactcatgtctctattggctgccaacaataatggttctcatggatcacaggttaatcagattggtacaagttctgctcatacatcaaacataggtaatgtactatccattgtttgcaatattcacaaatctgaaggtgtagcatggattctggactttggtgctacagatcatgttgcatcctcattggcctattattccacatacagagaaataaaacccataacagttcacttgcctactggtcaacaagttatagctacacactctggaacagtccaatttactgagtttttgcacttagaagatgtgttatatttaccatctttcaatttcaatttaatctcaatatcaaaactggtttcttccttgaattgtcagttaaccttcttctctaattcatgtttgattcaggatataagcagccagaggatgattggtacagttgatgtagtggatggcttatacaagcttagagtacctgctgccaattcagttctcaagccaagcaacaattttatttctgttaagtctgtcctgtcatgtaataaagaaatcattgatatttggcattttcgtctaggtcatccttcatatgataggatggaattgttaaaacaaacttatcctatgctgacttgtaataaaaactttgtttgtgatacttgccatagagcaaaacagagaaaactttcatttccaaatagtaattcatatacctctagtcctttctctttcatataggtagatatttggggcccttgtgctacaactgctttaaatgggcagaagtattttcttacaattgtggatgatcacactagatttgtttggatttttattatgacttctaaagctgaaactcaaactcatttacaaacctttgtttcctatgttgagaggcaatttaatacaaaggtaaaagcgattcgatcagataatggcgctgaatttatcatgagacaattctatcatagtactggcataatacatcaaacctcctgtgttgaaactccacagcaaaatggaatagtggagagaaaacatcagcatttgttaaatgttactcgagctcttctttttcagtccaaattaccaccaattttttggtcttttgctttacaccatgctgctttgcttatcaattgcttaccaactccattccttaacaatatatctccctttcaaaaattatatggcactgcttatgacatttcttccttgaaagtctttggttgcttatgctacactagcactctcactaataatagaaagaaacttgatcctagagcttctgcttctattttcttaggcttcaagccctacactaaaggatacattacctttgatctttccactagagccacagtggtgtctagacatgtcattttttatgaagactgttttccttatgcctcttccagtgcttctcaatcttttcccacatttcctgtgcattcctatcccaccatttatgaacatgctaaggatttggatcttccctcacactctagtatttttgataattctcagtcatctaacaattctattgatcattcacaattggatacttctgaccctgcaaattcaccagttattgttgctcctagaagatctgacagggaaagaatcagaccaaagaaatttgaagactttcacactacattcacatcaactgttactgatcaatcctcaggtgctctttatcccctaacctcagttttgtcttacaaaagtttatctcccacatatcatagttccatcatggctgtatccgctgaaacagaacctaagtcttttaaagaagcttcccaatcagataagtggatcaaagccatgaatattgagattgaggctttggaggctaatcatacttgggttttatctgaccttcctcctaacaaatctgctattggatgtaaatgggtttataaaataaaacacaagctgatgggtcagtagaaagatataaggcaaggttagtagccaaaggatatactcaggttgagggtcaagattaccttgatactttttccccagtggctaagataactactgtgagattattacttgctttagctgctgttaacaattggcatttaaaacaattagatgtgaataatgcctttttacatggagatcttaatgaagaagtttacatgcttttgcctcctggtctgcaatccacccaacctaatcaagtttgtaaattacaaagatctttgtatggccttaaacaagctagtagacagtggtttgctcgactgtccactttctttatctcacatggttataaacaatgttcttctgatcattctttttttattaaacaacaccttcagtcttctactattttactggtttatgtagatgacattgtcttgtcaggcaatgatcatctagagattacatccatcactcaactcttggatgaagtattcaaaatcaaagatcttggtgatttaaaattcttccttggatttgaggtggctcgcagtaaacaagggatcaatatttgtcaaaggaaatatgttcttgatatattacatgatacaggtatgttaggcagcaaacctgtttctactccaattgattatggtgtaagactacaccaacaatctggtacaccacttgatgatactgaagcttcattatatcgtagactcattggtagacttatttacctcaccaatacaagacccgatattacatatgcagtgcaacacttaagtcaatttgtagctcatccttcttcagctcatcaagaagcagcttatagaattctcagatacttgaaagcagctccaggttctggtatttttttctctgcttccaacattctccagctcaaagcgtttagtgattctgactgggcaggttgtcttgatacccgacggtctatcactggctgttcagtttatcttggtagctctcttatttcttggaaatccaaaaagcaggccatagtctccagaagttcatcagaagctgaatatcgggcactagccagtgctacttgtgaattacaatggttaacctatttacttgatgactttggagtcaattacactcgaccagctcttttattttgtgacaatcgctccgctctccatattgctgctaatcctgtttttcacgaacgcacaaaacatattgagatagactgtcacattgtgcgggagaaactacattcaggtcttatcaagttgctgcctattgcttctaatcatcaacttgcagacatatatactaaggcactttctccaggagctttcaagtttcttcagtgcaagctgggaatgtcgaacatacattctccagcttgaggggggatattaattatcctatattaactaagtttgttaggataactaaatatgttagagcagattaattttctgctatggttattatcataagtttgttagagtagattatctttatatcataatgactgcagcttctgctatcataaatttgttagagtagattatctttctgttatatcataataactgcagcttctgctatgataattataaatactgcagcatgcttgtattcaacgtgtgtgaataaatagattctttcattagcctttttctttatgttcatgacctcagttcaattgtttgttaccacgagcatgctagactcggctattcctttggctgcatctttaatttcttcagataacttcttgtgttcatcataaaatacatcaattggtgtcttgcccattctgtttctcattgttcttagttcacgaggaacattccactccacgaactatttacaaatcaagagtatatgtaaatgatggtatccaaatgcattacttaattaatctttcaattatcacttaataactagagaaaattacagcaatacctcctaagatctagtgtaattatactaacattttccgaggtattagagtaaggaatgaggagatgttactctaatgttttcaaacatataaaaaatgttaatgtaattttaatttcaaacttaaaaaaagttagtgtaggaaaattaaaaatggaattgcatataattacacgaaacctgatgagaattattgtaatttgctctaataactattagatattaaatttgtaagaaatacaaattcaaagttaaaatattttaaaaataaatcttaagggtgatatttattgttacaaatgcacttgtataatttttaattaaaattttctatcaatataatggctgtttaactattatgctaaagacaatggataaaaaaattttaaaaattgttacaataatcaacaaatacgacacacaatgatttctatttttaatttaaacttgttactttttaaagatttaaaatcagtctagctaacataagcctaaaatttgtggaattttaaatttttaaaataagattgatagaactgatcgatcccatgcgagtgaataaagaatggttgaataagaaaactaagcaaattaattgaccttgaaccatgcgagctctctttgcatttgaatgcttgctcttaaagtggacaaatcttcgaattcaactcgtggaagatgcgcagccaagtgtagaatgttgttaccttcattgtccacttctagtacttgatgcttttttaatgtccatggtatactattaaatattcttttttgtcgaaataccacaaccaagtgcagtaggttccgtccatttctgctgtccctttgaggcactaattcaggattcttgtcaataatcatcttcacagcctccacatttcctgattttattgcatcttcacgattctgttccaatgattcaacttaatttagtcaatacttcactatgtagcagcttccatagatctccttggcaaacattaatttctgttattagaataactcaacaaacatcaaataccattattagactggatatagataattaaggactaattcttaatttttatatagaacaaaaatatatataagtttctaaaatcaaaatcaaaatggaaatgatgtcaaataagatctaaattttagcttagaacacacaaaaaataaaaagccattttcaacttgtgaaaggttacctgaactttctgcttgtctcctcagcatattcactgctgtaacgtcctgttcatttcttgcaatggctatagttggatgtttttcaaacaaacgctttgccgaatctgttatatgcacaaattaaatagtacaaggcaaggtaaataaaaacaccaactaaattgaaaaaccacgtacgagttcatatatatctccttttatatatatgaaatcattgagaatttagctaggacctgtttggttttaaaggatgcatgatattacagtctttcagaaacctaatagtcataattaattatttcaactgattcagtgggttcgattcagtttgtaaaacttcataatatgtaaaagagaactagattacaaaaaggagaaataaggttgtttaattagttttagttttacacttacaaaacatgctgaacctaatggtcatcataaacagtcgttcaatatccttgaaatccattttgtcaagcacttcctcagaggacaaaatgtccaccatgctgtcgctcgtcaaatatggacctgcagccaagtgagctggaagcatcccatctgagtttggtattagcatgtcttctggcctcatacgcttaaccaactctttcacaatttcaagactgccttcccttactgctagatgaagagctgtgtttccatctgagtttggtattcgcatgtcttctggcctcatacggttaaccaactctttcacaatttcaagcctgtcgtaacgttgtgctgctagatgaagagctgtgtctccatctgagtttggtattagcatgtcttctggcctcatacggttaaccaactctttcacaatttcaagcctgccttcccatgctgcgtcatgaagagctgtctctccatatgagtcttttattatcatgtcttctagcctcatacggttaaccaactcattcacaatttcaagactgccttcccttgctgctgttggaaatcgacaatcacacacaaaacgtaaaacagaaaagagaatagagaagagagatatgacacagtaatttaccctggttcacccaatgtaggctacgtccagcttgtctgtactataatcacctcaccgccactcgttacaagtcactcggtttacaagggaaatataaataggattaaaaagaaaccctaacagtagctattcatgggccctagcccaaactactaataaaagtaaaatattacaaataatcagaggcccacaacaatacctagaagaagaagggttgtcatctgactgcgaaagatgagccatatccaacagctgctagatgaagagctgtgtctccactatcatttaacggcatgcgtaccatatcaggatatttttcaataatctgtttcgatttgagccactcttgccggcatattagtgtcgtcagatctactacttttaaagaacctgcaatcctttcaaacttcacattataatttctcatttaccctaaatatgtaaaaattcttttggaaacttgtctcaaattttgaattcctaataatttcatcatttgtaaattgaaatctagttgagaaattcgagattatgtagtcgaagggatccaatcatagatcacctttaattaagtttgaaaattgaatttcaatttgtgtttgaaaattaattctatgatgataagtaaaattgtttttgagagaagtaatttattttttcttttcttcagttgacaaaagctaattgatcataacatgcgacttatacttatttatactcatactttaaaagtgattctactttttttttttttnnnnnnnnnnnnnnnnnnnnnnnnnnnnnnnnnnnnnnnnnnnnnnnnnnnnnnnnnnnnnnnnnnnnnnnnnnnnnnnnnnnnnnnnnnnnnnnnnnnnnnnnnnnnnnnnnnnnnnnnnnnnnnnnnnnnnnnnnnnnnnnnnnnttttttttatctttcgaataaaataataattttctaaacccattgtttaaatatcattattataataatagtatagatatattttttttttaacgtcaagcgatttcaaattcattttttcaaaatgtaaaataaaaaactcttaagacatgatctctgaaatgcaccttgttgtgaatgcaatagtttaaagtataacttactcagctcttctggagtcatttcattcactcctctactttcatgttttggtgtcggtgagtttgttgaagaggcaattggagtttggtcatgactttgattaggagtatgatctggtgttggtataatctgaattttgtggtcatctgaaacttcgatattggagtccatgatttaattctagggaaaatgaagtgaattggatacctctctgaaattccctgttctatcgatgttgcttctttctttccagcctgcgaagcctgaacacatattatatttggtggtaaaacaagagtccttaattagttttccaacttgcacttaaaataattatttccaatatgacattttgtggattacagcaatgttaattcaatctgttcaacatttcaacacttgagttttcaaagtgaataaatatattcattaaatttgttaacataaaaaaaaatattcattataaaagaattatattcattaaatttgtggattagcgagactcactattcatgacactgttaattaaagtactctcaatttaatattatcttcgttgtacaatgataggatatctttacacacctaaaaccttcaagttcctactcttatattgttgacgaaaactttctgccatagcggtggttatatatttatccaacttccgttgacgcatttaattatatgattatatcctaactctggtctttttatactagttataatcaattaatccaacaaccattgaattcaaagctaagactagatgcattttattatcggaatatgtataaatttattaaactcactccaacaaccattgaattcaatattaattcactcttttatatcctaactctggtctttttatattagttacggacattttgattcaatatatttaatagttatgttggtaattgttgttatgatatttttttcatttatgttaaatatgttattttactaatgatataaaattaatgaattggtaaatttattgtattttttatttttattgactaaaacttaaatttttatcttttaaaaaataaataaacaaatttttgagcgttctatgcatccaaaaaaaaaataataataattacttatccaacacatttttataaatttaaggaagaagcaggctataatgggagaggataatcgatctctcactgtgagaaagtattttatgaccatcaaattactttgtgttgaattgtataatttaaattttaaattaatattaagatttattaggttgttacaatttgttatcatatttcaatatttgggaattaagattagatcaatttgttattatcccgtattattagcattttgttattgaatttttttatcttatataagaatttgagagaaaatatatgaaagagaatggaagagtccatgaatgaaaggagttatttatgaaaactctactttttaacactttgtcctcctatttcccgtacccttttcctctttctccttctcttcttttccattcttcctctcttcgtcttagcggcaacggtggtgccatgacggtcgatgatagtggggatgttgattcgtcgttgcctgaccgttgttctgctaaaagatttcaacaagagaaaaagcatggaagacgaaacagtcacaaagtttgatataactattgtctcacttaaacccaaattggattcaattgaacgaacccagattttagtctcccaaagttttgagcttttttgtattttttgtgtacgttgattttttctcaagggtgccaagttacgagtttgtttcttgcataaacgttgtttctataccattttactctcaattttgagtccaattcgggagaataaaagacctaagattttggttttgaaaatcagatgacattttttatgacaatatgtgattatatttgaaattgcagtttcaaggaaattattgtaccattgatttataatatttgtaatctggccttgttttctatgtttagatatgtgatgggtggtggcgcatggtcgtggctccaccgccgtagtgaccatctatggatggtggaatagggaaaaaggaggaaagaaagggttgccaaaaattgctttctgtgtaggttcgttgtcggagacaagaaaaatggaagaagaaaggccaaaaaaatgaaatgctgccgccagaggtgatttttggcaatggtgcacagtggctaacgacaatggtgatgaataagctagagggataaatcgagaaagtcaagaagaaaagaaaaaattcatccatgggattaaaatttgataaatctaatggtagaaattcactttatcattaattggagacctattacactctcccacactagactgtgtcagattatggattaaattgtacattttgaaagatttaagactaaaaataatattaaacgaaattaaagagtctaaacatatattttactcaaaaatatttcaaatcttgctttgaattagttgtttgacatttgatagtgtgtttcatactaaattatcccacatgcaagatataactatatatataatatttatgatctaggatttaaatcaaggataataagaaccctaaatcctaaattataaaccacatggaaagaaaacgactttgatatggtgtatgtgtagtgttgtgaactcggcaagtataccggtcgtacaagtaataaagtggtaaaagaagggatttgtcgttcccaacgaggattgtttggccaattaaattataaacttaatcgataagttggacgataattgaattgaataaattgttgttgtgtgtgtaataaataaactaaagctaaatgtgaacattaactaatatcaacagatgattaaagagatactaatatgtatggaaatgtagctagggcaacccacactcaatgtgcctctctatgaaataatattgactactatattctattatccaagctattcaactaatgtgctattcttatattgactaagctttgatgtctcttccacttagttctttaacccaccatccaaccctaatatcttagtgatcttaagtaagttaagcattaagcaacacataaatgagttcagttgcaagcacccatccctatgtctaggtgatgttagcaagttaccacacttaggtctgaaactaaagcccaatatgtctattgtgaacttgagttctaagcttttacctaggttagctaagtctaggcaagagaaggaaagagaaatacaaagtgcagtaaatagcttataataaatgaacaatagcattcaatacatcccaaggagatttacattaagtgctttggccctaactacattaattgctcagccaaacctcataatgggtggttgagctacaatattgaacatgcctagctggagcatagaagaagaagaggaagaaggaaaccccactttggtcttcaacctccaagccctagcaaagcttcctaagcttccaagaacctttaatgtgtgcttcttagtgccaaaaaaaacgtccattcccttttgaagctgagttatttataagggacatgtgaaactcccaatttgcccctgagaagcctcagaaattacaagatgcagagttacacgcctggggcgtggcttcccacgcctggagcgtggcttggcagagaaattttgagatggaggcagcttcccacgctggaggcgtggatgtccacgcttggggcgtggcactccagggagaaatacacttgcagaaagcttcccacgcctggggcgtggctacctctggttcttcagtgccttgaatcaagcttcttcctgctataaatatgtccaaattagcacaatgcatggaaagaaggcattcatcaacattgtacataattctatgcaattctaagctatttatcaatgattctggggttttagaagcttgaaaaggaccatatgctggatgcatatcaaacaattcccagatttagatattgctgtcctcagcaatgaacaaaaagtttgaataggaaagtatggatcaagtcttcagtgatgagttgcataaaacaagcttcaagtagagaatgctacaaatgactgattcacaatcaacttcagacaagcttttcaaatccatcaaacaatgagacccaaattggatacctctcacagatgtaaatttcactcagcactcaagtgtttggggtattataaactctcaatccatcactgttctagcattactataaacttgatcttattctctagttcctaaagataagaaacataaacacatgcaaagttgatcaaaaggtcttgaaaggttgtaacttggcttggctaaaaggtagacaaatttggaaagtgactaaataataatcgagattggaatagcatcaacttttccattcattcagattttccttcattttatttcactacctctttttagcatttctttttctttttcaattctttttttattcttgtatttttcctttttgctttcaattcatttcaacccaacttttgatttttctttttccgtttctaatgcttttcacctgaattcttttctttcaaccacaattcacataattcacatttgcatcccaatctcaaccaaggtgaggttatattagtggtttacattgattctttaaaaggtgtttgaacaattaagtctcaggctcaaggggctagcaagggattaataatttcagggaaagctatttggctcaagcttaaaagaataaagttgcctttatcacatcaacttatgcatgcatcagagagaaatgaatcaagttctagtgtactatcacagtgaggcatccctcaaaataaattaactgtatgggctcaaacctcactggctatggtatcaagctggactcatgatgatttcaaatcaaacttgttttccatctcatactgaactcagtcatacaagcattcaactcaattcctgctctatacacaatcaatccagaattcatatcaccaagacttcccaaaatatcaacacattcactgatttggcaattctaaacctgagtcatgctatgctttagcaaaattctaaaagtaaaacctaaactctaaatcaattcttgtattcctgtacgcattgatcacaaaaaaaaaaaaaaaaaatcaaaaatttctgcctatattgtatctgttcacaattcacaaaaagaacttgttcaacaaaaagatctatcattcacaaaaagaatttcaatcaactgatgcttgtttcctcaattaacgcgaccaattcccagatttaaaaccaattgctgccctcagcaatgacgctattcaaaaacgcatagggatgaacaaaatgaaacgcgttactagaggaaacaaagtgaaaaccatacgcattcatcaacagcagaagtatccaagtgttcaaacacatgcaccatatcacaaaaggtgcgcaaaagtctcaaaacagtaaagagtctaaacataaagcagaaactaaatataagcataaataaagatagagttcagaaagtgggggtccaattcagcgaggctgatcatcatccatggggtctgcgtcaactggtggtgatgatgggtatgcaaaagcaagcgcaggaggctgcggctgatactctgtggggtcaatggtcaaccggcggcaaatggcttcaatcatcctttgttgaccttcaaacatctgctgttgagtttcaagcatcgcctgctgttgcgtacttcacggcaagtgcaccgatcgtttaacaagtaataaagtgagtaagtgagttatcgtctccacagggattgggataattttcacaataatgtcaagaacgtgattgaaagtgaaaacagaaaattacgcagaagagtgttgttgattgattggttgtggtgttgtaaaacagaatttaaacaaatgcagtaaattgagttaagtttaccaatgagagatgaattgtagtcaggcgcaatcccttctgagtcttcctcttttacttgactgattcgttaaattaatttgaagtgcacatatgataaatctttcctataatcgtgaaacctagataactagcgagtcaaccctttaattgatcaaagaaccctaaacctatagcgattctgtcgaattaagcatgtaaagaatatatcatatggggtcgtgttatgattgttcagaaaataagtctttctaaattagtgaatccctaattccttagtgaattaaccctttaacctgaatcgaaaacctaattccttagtgaagtctatcagtttaagcattcaaaagaccatattatagtttctgcacctacgcatccctattcctaggtgatgaacaaatgttactctctatcagttcagaaattagaaccccaacgtccccattgtgaatcctaaccctatgcacttaaatgaagtgatcaatttcaaataagaatttggatgaagagaagataagaataaaacaatcaaaacataaatttatttcaataccagtcaattacagaggaattctcatcagttcatggcctttctacaataagaggtttagcctgccataggcctcaagaacaccaaagctgttgaataattcatgattttccttgcgatccttgcttcgatgcttgaattctagggtttggctggtgaatatgtgaagattcgatgatggataaaaagctctcccactctgttcagaggcctcctatatatactaatgtgtaattaaagaaagaaactcaaaagataatcttatttgcaaaacaaatcttttaaataggaaacagaatcctattcacgctatcagcgcgcgacgccacgctaatagcgtggacttctcaaaagtatgacgcgattagcgtcgcctctcacgctattagcgtgagttattcgagagttcagactgcttccaggcttctttcacgctgttggcgctgatttcacgctagtagcgtgatctgttcgagacatctggctttgattcgtcttgttgacgctaatagcgtgaggtttcacgctaatagcgtgacttggtcgagagctcagctcctatttccctttatatggcgctggtagcgtgaattctcacgctgatagcgtgagacttcctttttagttttctctctttgcttgtttttcctcctttttacctgcaaaatactcaaatgatattgaaattagttttaaacaattagaatgctaaactagcctaattctattctaattcatatatatttaattaaaatctaagttaaaactatgctaaaaactagatgtgtttgcaacacatcacctgctgagcatccaactttgcgtgcaactgctggtagctctcagaatcctcgtagatatgctcccggtgtgaggcatggctggaaggagaagcatgagctgtgggtggaggagaagcagctcgtggtgatggtctgggtatatcatactgaggctcccctagaccctcatgtggtggtggtctaggactgcgggcatccatttcttctcgggagagctcagcagagcggaggagttgctcttgaagaagacgcttcacagaatcttggtaagtgtgcgacgtcagagcggggcccggttgtacatctttaggctcatcctcggggatctccaacccagcatgcatacataaatgggagataagagaggaatgcgctagatggaagcgactgctgctgtcaagtgtcatttgcagaatccggttggaaagaatatatgctatgtgtaaattctgctcctgcatcaatacaaaaagcaagcaagtcctctcaacatttacatctgacatgttagttgagggaatgacggtgtgatttatgaattgatgccagaaatcagcttccggagtcagctctgagcgcttcaacttttctgggattgcctccataccagctttcattttccatgaagaaaagcgtccagtgatgcctcggcgaagctcatccgctaattgaggcatatcatctctgtaaagagccttgccggtgcctggaatgggctgcatgatatcatgtcgtctggcaaagtcacagccatgggtacgggtatatgaagtctggagaaagctttcaataaaggccgggtcaaatgggaccttcactcctcttacccagctgcgtctcctttcttcaactgtatccctgtccacattggccaggaactcttttaatatagaactggagctcggttctgggaagctaactaaggtgtgccattgatgcctggtaatcacctccaggataggtgaatcagctggtagaccctcccatgctatgcgcttttctggaattatcttcttgggcagataccatttatcgaatctctcttggtgttcgcgggaccggaaacgaccatcatcataatcagaagttcggggtcgcttgctgctggcccctgtggttgccttttgctggcctttgtccacttgctttccctgaaactcagaaaatttccatgtaccatatggtctccattagactttttcaaaaatagcaagggtataacatggacattcataattcccagatttatttgcaaccatatcattagcaattataacacaacatcacatatggttgcaaggaatttcccattcaaatctttacaacaagcatgccagttcagaatttgataatcaccttaagctaatcaccatgacaatagaacaatgaacaattaaacagatcataagcttgaggcaaatgaagcaagacagatgtaagaacagaccttgcacggaattcccagatttaatttcaacataatggttcacacgaatggtatccaattcaaagaacttgtgctcatgttcattacttgaaattaaaacctaggcattcagactctaactcagaattcccacatgatcattatagcacaattgcaaaacagagccctatctacgctaccattcccagatttaattcatatagtatctcacacaatgtgcttcaaattgggcaatgaatccagtgttcacagtttaatggtaatgtatttggtctttcaacaagaactctcaactattaaggcccaaccatcttatttgtcatcacattgtcctagggtttgattcacaatttcagaatagcaagccaaacaatggaataaacatgaaagcctttaagaaccctagaacaattgaattaaaccctaaatatagtatcccaatgcatgctaataccatgaaatctatcaattaggcaatgagttgctcgcaaccaagtaaggaacagacccacatcaacagcttttgacaagatacagttctcatgaaggcagagaagcatttcagtacaaaaacacctccacgcctgaggcgtgaaatcccacgcctgaggcgtgggctgggaaaaacagaaactaaaagctgcagcaagggggtgaatgttatcccttccacagcaaaggagcaacccaaaggaagagatgcttaccttatcacgacccatgttgatgcaatgcactggaaatagaagcttcaacttcaaaagccagaaaacccacttgaacgaaaacgtgaaatggaaatggggaagagagagaactgaagtggagagtgggagacagagagaaaacagaaatgagagagagagagagaaaaaatgagatgttaatgggaaaatgagggttatggaggtgagttaataggagttatgggaaataggaggagtggggaggtgaggggttagggttgtgagtgagagagagagagagaaggaattcgaaaattcaaatttaaaagcactgcagaactcccacgcctgaggcgtggaattccacgcctggagcgtggcataccaggggactttgaagatccagaaggcttcccacgcctggagcgtggaacttcacgcctggggcgtggccttccaggggtttttggtgttccaggcctctattcacgcctggggcgtggccttcccacgcctggggcgtgggattccagtgatagaaggatttccaggaggttttccacgcctggggcgtggcatcccacgcctggggcgtgggcttctagggaaggcttttatactgctttttctggtttaataggccatatgtgaccccctaactgctactcatgaaaatatgcttttaagcttgaatgaaaatgaaaagaaactagcaacacaaacaagattaacatacaaaaggtaaactatacattctatcctaagaacatgaaaacacagaacaagaaaacaccattgagttgcctctcaagaagcgcttgtttaacgtcacgagcctgacgtttaatcctctaaggattaggggagctcaaagggattgcacttgcatccctatcaattggaccaccatggtatggcttcagtcgccatccattgaccttgaagggttggttagagtccagaggagagatttctatggtgccataaggaaaaacctttaccactacaaatgggccagaccatctagacttgagtttacctggaaacaaccgcaaccgcgagttgtacaataatacctgttgacctggagcaaactctttgggatggatgtgcttgtcgtgccatttcttagttttctccttatagagctttgcgttctcatatgcagcaagtcagaattcatcgagttcattcagctgcaacaacctcttctcagtagccttggcgagctcgaaattgaggaacttggtggcccacatagctttatgctctaattctaccggaagatgacaagacttcccatacaccaactgatatggtgacataccaattggtgtcttaaaagctgtccggtaggcctacatagcatcatccagcttctttgaccaatccttccgtgagttcccaacagtcttctctaaaattcttttcaactctctgttggagacctcaacttggccactggtttgtgggtgatatggtgtggccaccttatgggttaccccatacttgttgagcaaactctcaatgttcttgttacagaagtgggtgcccccgtcactgatgattgctcttggaaccccaaaacgagtgaagatgttcttccttaagaaagcggacaccacctttgcatcatttgagggcaaggctgcagcttcaacccactttgacacatagtctacagccaccaaaatgtattggttggagtaagacttgggaaagggccccatgaagtctatgccccaaacatcaaacaattccacttctaagatgttgttgagtggcatttcgtccttccgagaaatatttcctgtcctttggcatctatcgcagctctccacaaatgccttagcatctttgaagatggtaggccaatagtatccactctgtaacaccttatgagctgtcctattgcctccaaagtggcctccatagctagaagaatggcaatgccacaaaatccttggcacgtcaaactcagccacacaccttctaattatgccatcagcacattggaagtataagaaagggctgtcccagtgatatctccgtgcatcatgcatgaatttcttcctttgttgccaagtcaagtcatctggaattgctcccacagctttatagtttgccatgtcagcaaaccatggtgtagcagtgatagccatcatttgttcatcaggaaatgactcattaatctccaactcgggcccatcttgcagattttcagcttgaattcttgataagtgatctgctactttgttttccaccccagctttgtcttttatctccaagtcaaactcttgaaataagagcatccaacgcagtaagcgtggcttagcatcctgctttgttaacaaatacttaagagcagcatggtcaatgaaaacaataactttggacccaatcaagtaaggcctaaacttgtctaatgcatatactatggctagcatttctttttcagtggtggcatagttaacctgtgcctcatttaaaactttgctagcatagtatataacatgtagaagtttatccttacgttgtcccaggacagcccctatagcataagcgcttgcatcgcacattagctcaaatggtaagttccaatcaggggctgtgagaactggtgcagttgtgagcttttcttttaacacattgaatgcacttagacaagactcatcaaagacaaaatcagattctttagtcaatagttggctaagaggtctagcaatcttggaaaaatctttaatgaacctcctatagaagccggcgtggcctaagaagctacgcacactattgacatttgtgggaggtggcaatttttcaatcaacatgagcttggcctcatctacctcaattcctttagaggagattttgtggcccaaaacaatgccatcacgcaccatgaaatggcacttctcccaatttaaaacaaggtttgtttcttggcatctttgcaaaactttagataaattagacaagcaagcatcaaagcaagaaccaaacacagaaaaatcatccatgaacacctctaaacatttttcaaccatatcagagaaaatagaaagcatacacctttgaaacgttgcgggcgcattgcacaaaccgaagggcatccttctgtaggcaaatactccaaatgggcaggtgaaagctgtcttatcctgatcttccggtgccacgggaatctgattatagccggaatatccatcaagaaagcaatagtaagcatggccggctaatcgctccaacatttgatcgatgaagggaagagggaaatgatccttccgagtcgcatcattgagtcttctataatcaacacacatgcgccagcccgtgatggttcttgtaggaatgagatcattgttgtcgttctgaaccaccgtcactccgcccttctttggaactgtctgtaccggactcacccaagcggtgtctgatatgggataaatcatcccagcatcaagaagcttcaccacttctttccggacaacttccttcatcattggattcaaccgcctttggggctgtcgaaccggcttcacatcatcctccatcagaatcttgtgggtacaaaatgagggattgatacccttcaaatctgaaatggaccacccaatggcagatttatgtgcctttagcactttgacgagctttgcttcttcatcttcagacaagcttttgctaatgatcacggggtatgtgtcattttctcccaaaaatacatacttgagggctgctggaagttctttcaactcgagcttaatttggtgccccaacctcaatgtctgtggcctttttctctaacacctccatggctacttcctctgactcttcaataactgccaattcctgggtgtttatcaactcttccaattcttgctccatagatacatttgactgaactaaatcatctagcacatccaactggaagcaatcatctttatccattgggaccttcatggcatcaagtacattgaaggtgatagactcatcaaacattctcagctccaacttcccttcagccacatctatgatagctctagccgtagccaagaatggcctacctagaagaacaagtatttctccttcttccatgtctagaacaatgaaatcagctggaaagataaacttgtccaccttgaccaaaatatcttcaatgaaaccactaggtcttctcaatgatcggtcagctagttgcaaagatacccgagtgggctttaactcagaaatgcccaaggatttgcatatagagaggggcatcaagttgatgcttgcaccaagatcacacaaagccttccccacattaacattacctatggcaataggtatgttaaaactccctggatctctaagcttcggtggaactttactctgaataatagcactacattcttcagtcaaaaccacagtttcacattcttggagcttatgcttcctagaaagcaattccttcatgaactttgcatagtttggcatattggccaaagcttccgcgaatggaatgttgacctgcagctttttaaacatatccagaaacttggcatattgtttcttttgattttgctgcttcatcctcaagggataaggaggcttctcaaacctggaaaagtccaggggctgcttaggctcagctgtgaccttctcctttcctttgttcttctctagttccttggagctgttgcaatcttttggtgttgcaagattttcaggttctgcagaattttctgctgcagaattttcaagtgatgcctcagcttttggagtctcattctcttcctctcttggcaccacttttaccttctccttaggagcgatgacaatcccactccgagtggtaatggctttagcatgctccctaggattgaccacagtatcactagggaattggcccggtggtctctcagctagttgccttgatatttgaccaatttgtgtctccaaattccgtatagaagctccttgattcttcaaatgagacctagtctcattcatgaaagcatcggtattttggatgtggtcattggttgtcttggctagctgcaacatggctctttcaagctcagatggctccttgggagggatgggtggtggttgcaaataatggttggatttgtaatccaaaccacccccatgtggtcttctcggatagttacttccactcccagaagcttggccataatttctctgataaccttgtggtggcctttgatcataccatactccattgacttgaatcggatcagcccccaccaaggttggacatacattggactcatggtccccttggcaatattcacacacagccatgcctgctttgattgacgaagcttgagctttggatacctctagcttgtcaatcttagcattgaggatggctagctgttgtgataaaagtttttgctcagccaacattgcgtctgagctacccaaatggatcacttctctctttggctgacttgctatgctttcattctcagttctggccaaagagtctattaaatcatgtgtttgggtagctgtttttgatctgatagagcctccagctgctccattgactatcagcttggattccggtgataatccattaaagaatatcctcaccttcttcccctcgggcatgtcatattgagggcaacgccggataagctcttgaaaacgattccaagccgcacataatgtttctccatggagctgtgtgaagttggtgatttcattcaccaagcggttatatttctccattgagaaatactgagcgaagaatcttgccatcaactcgtcccaagtagtgatgctgttagaaggctgacgatgtagccacctgagtgcttttcctttcaaggcaaaaggaaagaggcgaagtcgaatggcatcttctgtcactccttgatggcggatggtatcgcaaatcatcataaagtgatcagcaaagtcatgaggatcctcatcatcctcaccaccaaattggttcttctccaccaagctgataagagatgggtggatgtcaaagtgatgggcttgaattggtggcctgactatgctgggcgctggatggacaaacaatggagcaagaatattctccattaattcatcctccggccttggctgctcgttgttgttttcagccatgtctagttcctcttcaaatgtttcttcttcaagaggttgagaactagacccttctgcttctcttcttaacctcgttaacctccgattcctcctcgcggttttctcgatttcgggatcaaactggagttggtcagggctaacggtacctcgcatatactctagaagcaggtcagtaacaaaagaaatccaatcttaaagataaaaatttataatgaatttggctaaaacaatccccggcaacggcgccaaaaacttgttgcgaacttggcaagtataccggtcgtacaagtaataaagtggtaaaagaagggatttgtcgttcccaacgaggattgtttggccaattaaattataaacttaatcgataagttggacgataattgaattgaataaattgttgttgtgtgtgtaataaataaactaaagctaaatgtgaacattaactaatatcaacagatgattaaagagatactaatatgtatggaaatgtagctagggcaacccacactcaatgtgcctctctatgaaataatattgactactatattctattatccaagctattcaactaatgtgctattcttatattgactaagctttgatgtctcttccacttagttctttaacccaccatccaaccctaatatcttagtgatcttaagtaagttaagcattaagcaacacataaatgagttcagttgcaagcacccatccctatgtctaggtgatgttagcaagttaccacacttaggtatgaaactaaagcccaatatgtctattgtgaacttgagttctaagcttttacctaggttagctaagtctaggcaagagaaggaaagagaaatacaaagtgcagtaaatagcttataataaatgaacaatagcattcaatacatcccaaggagatttacattaagtgctttggccctaactacattaattgctcagccaaacctcataatgggtggttgagctacaatattgaacatgcctagctggagcatagaagaagaagaggaagaaggaaaccccactttggtcttcaacctccaagccctagcaaagcttcctaagcttccaagaacctttaatgtgtgcttcttagtgccaaaaaaatcgtccattcccttctgaagctgagttatttataagggacatgtgaaactcccaatttgcccctgagaagcctcagaaattacaagatgcagagttacacgcctggggcgtggcttcccacgcctggagcgtggcttggcagagaaattttgagatggaggcagcttcccacgctggaggtgtggatgtccacgcttggggcgtggcactccagggagaaatacacttgcagaaagcttcccacgcctggggcgtgggatcctacgcctggggcgtggctacctctggttcttcagtgccttgaatcaagcttcttcctgctataaatatgtccaaattagcacaatgcatggaaagaaggcattcatcaacattgtacacaattctatgcaattctaagctatttatcaatgattctggggttttagaagcttgaaaaggaccatatgctggatgcatatcatgtagtttacgaaaaagataatgtggattaattatagtgtgtttaaaatttggctttaaaattatgaatgagctaatgagatgagtcaaacttgattttatctaaaactagttaaatggttcatgacttgcacagtagtaattttacaatttataatttcttacaatattataactttttaagataacattttttttttatttttatttttattatcattataataaatatttatgacaatttaataaaaccatgataataaaaaaattaccataattattacaaaaacatattattgttaattaaattataatccatattatctcatgtatatattatttttttactattaaaatatccctaattaaataagagagaaatcacattaacatatatatttagaagagagagaaacattaatgataatagtatttttgaaaatatattattttagaataaatttattattatcggcttaattaattatttttttagttttgatgaattagataattgagtctcataaatagaaatggaggtagtatataatatagtagatatagcatatagtagattttgcatgtttagttattttaatataatcaaatttaattgaaaaaattatgatggagttgaagtaggaataataacttctacttataccaaaataaattctagttagattttgtctaatttactttcaaatcaataatctcatatgcatctatatgtttttttattgatttaaaaacatgattaaaattcttgctatattaatttatagattctagttgttatatttttttattgaatgcattttatctaatttatttttgtactcctaaccatattagtgtgataaaccattttataaaaggaaatattatatttcagtttaattattggtagatttgggtttaattttatatatatatatatatatatatatacatcaaaataactaattgtaatagaaaatcagtgtatatagacattcaaatccattttgatcattacaccatcaaaatcaatttaattcaaacaacactctctcataataaatcccttttctgatgttgatggagtatggtttgaccctctgttttattcatcttttcatcaatgaaattttatagtgaatgttatggtgctaatgagattggggtgtcaatagaattgaaagatgaatcccattagctagacttttgctccccgtttcttaaaaacaccatttttctaataactattatccaaacaaaaattacattactgtataatcaattctaaccataattaattatgtaaaatcatttgggtgtccgcctttaagcatattctacaatcatcttcttgcctaaacttgaaccatctacctatagtgctcttaatttcttacaaatctccaatttctccgcccgaccatgaagttgttggagagcagccacaaacaagtgtcaattacaaacattgacaaaccgctaacctatacaaaagcagaaaaagaactgaacaaaaacaactttcttgaatgaatcaacagcttaatattacaagatctgaaattaaatatccatccaagatcttattttgaaacttttatatacattatgatgcccgggtaaatccataaaattaagcttttcacaaccattaaattcattaacaaatcatggctacatctttgaaaattggattacctgttttttttctaattgtatgtgcctgtttgctcttccattttctccgtatagactacgaatgttacagtggaacatgagtagcaatatagagaaaaataaatgtaaactaagtgatatgcgcctagcataagctatttttccaagcttaatggagccataatataccttagagtgaataataattgctcctttttgttagaattgagactaaatgttccaaagtgatgctttccaacaaattatgcttatgactggaaaaagtagctaaagaagaaggtttcagcgcgaacagcgccaggtaccgcgccatccgcgccactagtcacgagccacgcgactcgcgccatatgcagcgcgagtagcgcgaatagggctctgcaattaaagaattctctggatcttggcgcgaccagcgccacatgccacgcgaaccgcgccagaacctttctgcaattgaagatctctctggattttgacaccatccgcgtggagtatagcgccatccgcgccaaatgttaattgtaaagtccacttccaacccacgtgagtcgcgccagtgcgacgctatccgcgccagtatcagcgcgactagcgccatgttccacgcgatccgtgcgagactcgatttctgcagattatcaaagctgtcaagggaaaacttggggtttcacttccccaagtataaatacaagaacccacttctgaagaggggactttttggacgaaattcactgaggaaaagctagagagagagcttggaagcttagctagggcttggggttgtgagtgcaagtgggtttcttcccatcttctctaccttctccttgcttgtgtatcagctgggcatgcttctttttgatgtaccaaggcaagccatgattaggtttggctagtttcattttgtagctagggccaaacacttgatgtaaacttccattggaatgtattgaatgctattattcatttatcgaaagttattttactgcactttgtttgaatgttgtctatctctttcttggacttgatcaatctagttaagagttaagagttagggttcacaataggaatattggggttctagtcgtggaactaagtgtagtgacttgctttacattatctagagatggaaatgtatgcttgtagcttattctagtgtttgcttaatgcttaaccctaggaaggtgactaagggattagaactttcaagtgggttgaagagttatttcattgaggaatcgatgagtaattgatatgcgacgaacacaaccgctgaataacttagataatcgaatgtagtgaacaatacgcgttcattggaaggaatcatcgagtgtgggtgccctggctacgctttctttacattgtcacaacttaccttgtttgctcataacttatctttatgttttaatcttgcctttactttatttactcaacaatcaactcattcttttgcaaacattttatttatccaacttttggatacaagtgataatacaatcggtgcactaatcctcgtgggaacgataacttctcttatccctttattacttgaacgaatggtatacttgccgatttcgcaacactaagtaaatgataggataaaacaaaacaagagagatcaaatttaaggttttgtgtttgtttgaggaagatattcgcacacgaggttgcaaccagtattacaaaaaccatcttcagattggcgattcaactagtcaaatacatgtctgaatgtctgatcagtaggctactggatcgatttgcaattggtcaatagactatcttttagtttctttctattcacaaactcttttttagcttagcataacctgaaactaattcttttaaactaattttggtttagtttggttcacaggaacaatttggtgcaatctctctgttttggttcagagcaccaaaacagttcagttccattcaaagcccaagtatagaaataaattgtatgcacttgtgtgaattttccatgcctttctttaatttgctgacataaggggattagagcttatcatcagcaaaaaagggtttatcgtctgaggaattgaagtttagctaaataagagaaattgaatcacataattaagacgaccaagagattatcttagggtggaatcaagggaatttcaacacctaaccatttttattaattgatttttctagtacagtattcaattgtgctcttgtttctttcaattaaataaaaaagtccaaaaattcctaattgtttatctcttaaatcaaaagagtaatcaataatttgatttattgatgtattgtgtattgttgataaaccaaattttttattgatacaataacttctccttattttatcaattgtacaactagtacacttgtagtattctcaacaaactacaacaatatactggtagaaggtgactcagttgatcttaaatttaataaataaggcgtgttcagtcacgcacaatttagacgtgtttgacagctccatatttgtaaatagtttcaaaacaactccaaatttgtaatttttttgcctgcttttgggagtttctatgaattatctctgatttatgattatttgtgtttatgtattgcagctaaagcactagagttatttctgcaagatttgtgtgatcgaacatatgagataactttgaggaggggggcaaagactatgaatgcttttcatttgtctatgtcaagtctgttcaaggtggttacaaggctgcaggtttctttcttttggaggtcggttattactatgtacttataagaacatcagatccgcaattctaatgataatatgcacaatcaaacaatttccttcctgtgccttctatttatcacatgcacaaacatgattagacatgtaaatgacagctgcagaagaaaatgttgggatggtcttgcttttggaacatgttttttgttctagtgtttaccttcactttccagtttctaaaatgtctgagttacttcacttgcatccttgcctttgcagaaaccagtgtgtgcagacttttaatgtctttgattttctgaaagatattgtcagcaaggttccggatttaggctgttctgttgcaactggtgatgatcatgctgtcactaagaggaggtttgtgctctggttaatactcttgttacttggaacaagttttcagtatgctgaactttgtttactttatattaggaaagttgccggagatgatgataatgacagcgacgaggagctcaagagaaataagaaggtaatttataaactgtattcaattacttaatcagtggttagcttaaatttttcttgtgtgattgaaccttttgctgagtaattatctcttgtccatgcacactgtgaaccttttgctggatacaaaaaaatttacttcagtcaatagggaaacccgctagtggcttgtgaatgcaagtacgtctaaatgtctaatagtctgcgaggctaggccccacttcaacttaaagcttactacacaaaggaccaaaactgtctcgttttctgaaaacttttgctgaaaactatagaattggcactaaagaacctggcagctgtttaatattaaatattatctgaattatggaacttttttttcccatgattttcacagccagagcctggacataacagtggcagaggaaggggtaggggcagaggtaggggtaggggccgtggaattagaactgtagatcaagagatgagttcacatgccaagtgggaagatgattctgatgtattgaagcagaatgacaaccacactcaaagcaatgaaagcatggaaaatgtgccggaacctgaagtagttaagcagagttttccactaagcaaactggctgaagtgtccattctaaattttgacttaaatttggacccagatgaggatatggattcattagacacaccaatttctgtcccaactagttcatctgcaaaatcagtgtcagaagagaagcatgaggaataccctggatgccccttgtctgaaatggaaaaaatgaccattgatcccattcaactagccgacataaatggaaggattgatgaagaagaagaggattatgatgaagaaatgcagatgaacctgtgttggtttattcattacttctcatataggcccgtcattagaatgttcttatggggaattagagtagattttgtaggagcagtgttagatacttactccttagtagtttaggaagattaggagggatagtgcattgaattgaatactctccttataacccttgttttaggttaaaataaagtggagatatagattgttccaattagacatagccacttgccagtatagtgatgacttatgagaaattttaatctcatgtaggtattgcttatggtaggcactacattcagattttgggtgtgttatggctcaaaattttacgaggatgcctatcttaatcacacttgtatctagcggaactaactcactgctccggcaacatgatttgcatgcaaccttttgaatttttggtatcttgaacttattgcacgatgagacaagaggaaaagaataagacgttagacggattgaaataaataggaaataaagtgaaaaagatgtgttgtttagatgaataaaaatagaaaggaaataagtgtagaaattcattatttatgtttgttttggacaaatgaaagagaaaatactaccagatgaattgtttgaaaaaaaatatacattttttttaaattatttccatcatttttctaacataagattattaatttttattatataatatacttattttttttttaatatttataagcaccactaatggctgctctgtaaaaccaatctcgtctcagactaatttgtttaagtttaaaataagtgattttaaaataaatattttttaaataaacacttatttaataaacaaataaaattgatcaaaataagaagaaaaattattttttaagcacacacaatttagataaatacactaaaaaatacaaaattatttattttattaaataaatatttttttcacgaataaatttaaacaaatttatcaaagaacctcacttgagttacaagcacgagttagactaattagtacacatgtcagataattataaataataattgaataatttgaataattaactactaaatgtgggacttgtgtctataccatgaggtgaaaattatctaaggtagaacataaactagattttgagttcaaaatctaatcttcattagatctccaaataaaggaggtgagcaaatcttaaacatagaaaataagttcttatagaaggtttctcaataactgcacattattcaattttctttttcttttctctctttctaatagatctcaaaatgagatatactattaaagaaaaataggaaagatcttgaaaggtatttaatcttacatgacactatagaatttacaaaaaagtgatcttagatctcaatttgagatctattattaaagattctcttatgattttgaatctacttagaatactaacaagaaagacgtgaaactaaaattccaaagtacaattaacttggtcctagctctagatccacatgcttacatgcctccgtccctgattggagatgtatgaagtttatatttaatatggataagtcctaggaaacacataatagctgggggtcaatctcaaagtttggaatacctataatttcttattagggtcaatctcaaagtttggaatacctataatttcttattaaaatgccaaactaaatggttcttaacataataacagtggttgtgacatatactaggataggaaacgcacaatatatagtcttaaattcaaagacgagcttaattgtttcacaaacaaataacacagtgtggacactgtcacactgtctataaatatcaagatacagaaaatgaggagaaagttttagagtttgccagtgtctataactatgtaataagttactagagttcggatggaagataaaatctagaccataagtgtttgtcgaaaaagctaaattgaaagagaagaaacagaagaattgggaaaacccccattgaagccactgcataagaaatccacttggaagtgtgatcaaatatcagaaaggaagctgcagtgaaagccacaaccatagcagcaactgagataataagtaacgcacgccgaaaagtcaagctcggatgcagtgatgtcaccaatttgcgatcgttttttgcgagtcttgatgaagtgaaatttgacaagaaagatagtagagatgcagaagaagtgaataatgcgactgcatttgttaagatgaagacagtaaaccacgcattgttcttgttgtcacctggaacagtaagagcagcggcaaatgctaccgtagcaacaagtgctgccacaaccatgccatactcggctattcctttggctgcatctttaatttcttccgataacttcttgtgttcttcttgaaataaatcctttggtctcttgcccttgttgtttctcattgtgcttaatttatcatcaacatacgacttcactaactatttatcaatcaagagtatatgtcaatgatggtatccaaatatatatttgcgcatgcattggttggcataaattaatgtcaatgcataactataacttaattaatcttttcacttttttttttttataagcaaaatattattgataaagcttaaacaatatatgccttgattaatcttttaattacaacttttttttgaagaaatcttttaatgacaacttaataactattacatgctaaacttgtaagaagtacaatttcaaacttaagatatattttcttttannnnnnnnnnnnnnnnnnnnnnnnnnnnnnnnnnnnnnnnnnnnnnnnnnnnnnnnnnnnnnnnnnnnnnnnnnnnnnnnnnnnnnnnnnnnnnnnnnnnnnnnnnnnnnnnnnnnnnnnnnnnnnnnnnnnnnnnnnnnnnnnnnnnnnnnnnnnnnnnnnnnnnnnnnnnnnnnnnnnnnnnnnnnnnnnnnnnnnnnnnnnnnnnnnnnnnnnnnnnnnnnnnnnnnnnnnnnnnnnnnnnnnnnnnnnnnnnnnnnnnnnnnnnnnnnnnnnnnnnnnnnnnnnnnnnnnnnnnnnnnnnnnnnnnnnnnnnnnnnnnnnnnnnnnnnnnnnnnnnnnnnnnnnnnnnnnnnnnnnnnnnnnnnnnnnnnnnnnnnnnnnnnnnnnnnnnnnnnnnnnnnnnnnnnnnnnnnnnnnnnnnnnnnnnnnnnnnnnnnnnnnnnnnnnnnnnnnnnnnnnnnnnnnnnnnnnnnnnnnnnnnnnnnnnnnnnnnnnnnnnnnnnnnnnnnnnnnnnnnnnnnnnnnnnnnnnnnnnnnnnnnnnnnnnnnnnnnnnnnnnnnnnnnnnnnnnnnnnnnnnnnnnnnnnnnnnnnnnnnnnnnnnnnnnnnnnnnnnnnnnnnnnnnnnnnnnnnnnnnnnnnnnnnnnnnnnnnnnnnnnnnnnnnnnnnnnnnnnnnnnnnnnnnnnnnnnnnnnnnnnnnnnnnnnnnnnnnnnnnnnnnnnnnnnnnnnnnnnnnnnnnnnnnnnnnnnnnnnnnnnnnnnnnnnnnnnnnnnnnnnnnnnnnnnnnnnnnnnnnnnnnnnnnnnnnnnnnnnnnnnnnnnnnnnnnnnnnnnnnnnnnnnnnnnnnnnnnnnnnnnnnnnnnnnnnnnnnnnnnnnnnnnnnnnnnnnnnnnnnnnnnnnnnnnnnnnnnnnnnnnnnnnnnnnnnnnnnnnnnnnnnnnnnnnnnnnnnnnnnnnnnnnnnnnnnnnnnnnnnnnnnnnnnnnnnnnnnnnnnnnnnnnnnnnnnnnnnnnnnnnnnnnnnnnnnnnnnnnnnnnnnnnnnnnnnnnnnnnnnnnnnnnnnnnnnnnnnnnnnnnnnnnnnnnnnnnnnnnnnnnnnnnnnnnnnnnnnnnnnnnnnnnnnnnnnnnnnnnnnnnnnnnnnnnnnnnnnnnnnnnnnnnnnnnnnnnnnnnnnnnnnnnnnnnnnnnnnnnnnnnnnnnnnnnnnnnnnnnnnnnnnnnnnnaaaaaaaaaaaaactagagggtaatgttgaatattgttacagatgcactgctagtcttctacccttatcctgtaattctcagtaaaatctttcttactacttattgattgttcaaagacaaaatttcaaaaatattttagtaatgagcaattgctattttaattataaacttgttacttttgaacacttaaaattaaatcaatcttgttaagaaaaccctaaaatttatgcaatttttaaaataagattgctcgaactgatcctatacatataaaataaagaggaagatcgcaacaaagaatgatgggtaataataagcaattaaattgacaatttgagctctctttgcatttgaatccttgctctaaaactggacaatgcttcgcattcaagtggcagatgcgcagcaaagtggtgaacattgttaccttcattgtcctttgccagttgtaaatgctctattaattccgccagatccattcttttaagaatggtatcttttcgatatagaacaaccaagtgcagtaggttccgtccattattggggtcctttatgctcagtagctcacgattgttgtcaataagccaaaatacagccttagcgtttcctgattttactgcatcaaacagcactgtcgaacatatcaactccatatcctttttgttttccatttttctaacttgagtccataattttttaagcaattccagactcgcttgtgatgaacctcctgtattgttgtcctctaatttcgtgtccagcaataagcacagttgattggtccaagcaatgtttaaaatgaaaacaaagaaaaaaaaaagttaaactaaaaatttattcttatatgaaacacaccattttttttttgtttttatatctattttaaaaaatatatataactttctaaaataagaatcaatatggaaattatgccagatacgaagatctaaattttagtttaccacacacataaaaaataaaaagtcattctcaacttgtgaaagcttacctggaaattccggtgacttttgcgccagcatatgcaatgctgtaaagttctcttcatttcttgccatggccaaagtacttggatatttttcaaacaatttcattgccacatctgttatatgcacaaattaaatagtaaaactcctactaaattgaaaaatcacgcacgagttcatatatacagacacaagttaaacaacatattaattaattataataagatcgagtaaactacaaaaacacttcttaaagtttcttaaaattacacacaataatatccctcattttttacacttacactaaacctctaattgtttgaaaaacattatattgaaatctcttacacattatattaatcttccttaattgtttgcaaaacattacattggatggataagggagctgctgtaatgataaaaaaagttggagatttattgtaaattcaatttaatcttataaaaatccaaagatgcggcctccggtactagctgggttctaaattacttggggcaaaggacaaagtatgttgaaatttatatcttgatctgattagggtttctatcaaaatttgatatagatcatttgaatcaagtagtactttttagtctcttttcattaattcccattacctgttaattagaaaagctagctacgtataattgctaaaataaacaattatatcattcacgttaattactcataaaaaactactataaaaattaattttaaataagaaagcaatgagaaattggacctgttgggttttacaggatgatatcacaatctttcaaaaacctaggggtcataatataagtatttctacagttctctactgatcattaaatttgttattgagttatggtcaattaaaccgaatgacgttggaattgaaaacctatagcttatgtatgatcagctcaattggttcatgaattgagattgcatgtttagttttacactcaccaaacatgttgctttctatggtcataaaaaacagtcgttcaatatccttggaagccattttgtcaagcacattctcagaggacaagacttgcaccattttgttgtcgccatataaagcagccaagtgaactggaagcctctcttgtgagtttggtattagcagttcttctgggttcataagcttaactaaccctttcacacaagtaatgttccctccatatactgctacatgaagagctgtgtctctcttctactatcatttaacggaatgcgtaccatatcaggatatttatcaataaccgtttgtgcttctctccactcaccccataatatatgtttgcacagatcatcttttaaagaacctgcaatcctttcaaacttcacattataacatttaattcctttatttaatcttaaccacatattatttgcaaaaaagatgaccctttcttgtttaccataaatgtgtagaaattcttcatatagaaattgtctcaattttgaattcctattaatttcatagtttgtaagtctctgtttttcaagacacccttattgaaatctagctgagaaactggagatcacggttatgtttggcccaactttttttctacttagaagttatttttagctaaaaattagaactgaaaataaaagataaaaactgtttgtcgtttttattttttcagcttaaaatttctttttaaattaaaaattgctttataaaaaaatttaaaagttttaattttatttaaaagtagttatctcttccaaaaaaaatacacttataaaattaaaaaaaattgtataaattaactaaatttatataaaattactttgttaaattaaattatacaataagaggaatgcatttaatttaaaaatgtgacatattactaggatatatatatatatatatatatatatatatatatatatacttcaaaggtgattctacttttatctttcaaataaaatttatttttctaaacctatttttaaaatatcatccgtataatataaatcaatttttttaatgtcaaattcaaaatattcaaaatccaaacttaaaaactctagagtgttgtgtcaatgcaatataacttactccgctcttctggattgatttcattctccactatatgttcatcagcagctgaagcagcaactagagttatttcactcacacctctgctttcatgttgcggtgtggccgaggcaccagcagctgaagtggcaactggagtttgttcatggctttgactaggaatgtgatttgatgatgatattataatctgaattttgtggtcatctgaaacttcgacattggagttcatgattttctaaagaaatgcccgtgggatgtgtgaggaggacacttaattgtcttgttgttgcggtacgttgatcagtgtctgagtgatgagggagcggtttctgagcaatgttatatgcaaagagagtgaagctttttgagacttaagggtggtgtgtgtgtgcctgcagatgtggctgtggactatatataatttataggtagtccggaacaaatacaatcaatatcttcactgatttttatatgacaaatagtgttattatttttttataaattataaactttgaatgcatgttatgtagacattggttgagattatgaatacaaagtgattccacatacactatttaattaatttctcttggctgacaggtgtgccatgacaaaaaaaaaaaaaattgttgagcccacatgcaaataactgtactgattttttgagtgaggaaaaagcaactgcagtagacacacggaagacaatcatctttacccaaaattgttaccttacttttttgtttttgttgttatctttttttgtatttttaatatttcctgtaccttttgcatttatttttttgacttatttttatccattttcttaggcgaatttgaaatgttgctttagattagttgtaaagctaagcaaattgctttgttagattcttctgaatgtcattctttttcaccttccgagaaagccagaagaggtcctttattcctttgttaaaactactgcttccaagtattccatactataattctggacgattaaaagataacaaaattcctttcccactaggtgggggtggaatatatggataaaaattaaaaagcctcaatgtcttgttataaatcatgccataacactaatcattcaaataaaactaatatagtttttcttggtctctccctatctctaactaattaatgcgactagcctccatttgatcctgatgtacttcctttattcggattctatagcttttctccacacatatgtgggaaatagacaccaaggtcttatgtggcccaccttgtgttcttacattagccttgacccccattgtacatgtctctgattgctcgaatatagacaatatatatacctttctgtctccacaggaccacagcctcgcgtaatacagtacacgcatacctttattttttttatataacttaagttatataaaaagtacgtacaataatctcaaattcaaacagaaccttggttaattatttcacaaacaaattatacagtgtggacactgccaccttctatataggactttaagatatgaaagtctttgcgactaggttgctgaactttgggcatacgatagtatctagaccataagaagtctaaacggttaaattgaaagagaagaaacagaagtattgggaaaacccccattgaagccagtcataagaaacccacttggaagtgtgatcaaatatcaaagaggaggctgcagtgaaagccacaaccatagcagcaacggagataataagtatgcaactgcattggccttttcacctggaacagtcagagcagtggcgaatgctacggtagcaacaagtgctgccacgagcatgccagactcagctattcctttggctgcatctttaatttcttcagataacttcttgtcttcatcataaagtacatcaattggtgtcttgcccatgttgtttctcattgtccttaattcacgaggaacatccatgtctactttctatttatcaatcaagagtagtatatatcaatgatggtatccaaatatatatacatatatgcgcattggttgggatcaattaatgtcaatgcacaacatgattaatcttttaattaccacttaataactattactagttaattttttaagttaagatattaaaaataaaaagaattgatctagcttgaacaatgcgaactctctttgcatttgaatggttgctctaaaactggagaatataatgctttgaatttaagtagcagatgagcagctaagtgtagaacgttgttaccttcattgtccactgctcctactatatgctctatcttttttttaagtatactaaaaaaaatgcttctttttccatatagggcagccaagtgcagtggttccgtgcattgttgaggtcccttatcatggtctagttcactattatcgtcaagaacccaactaagagcctcatcattttttgattttagtgcatcaaatagcactgcccaagttatcaactctaaaatcttttcatattccaactgtttaacttgagcccatagttttttaagcaattccagacccgctcaagcaccttcattgctgtggtcctctttcatgtctagcaacaagcatacatatatagttgattggtccaacaaatgtataacatgagcataaagaaacaagttaaattaaagtttggtcttatatgaaacatcatttttttgacaaacacataattaaataaataaacaccattctcaaccgatcatgaaagcttacttggaatttctgaaggctttcgcaccagcatatccaatgctgttaacttctcttttgcctcttcatctgttgcaatggccaaatcagttagatatttttcaaataatttcattgccacatgtgttacatgcacaaattaaatagcgatggtggattgcatatgtacaaggcaaggtaaaactccaactaaattgaaaaaccacgtaggagttcaactagataaaaaaaaaaggatggttggttttacacttaccaaacatgttgctgctaatggtcataaaaaacagtcgttgaatatccttataagccattttgtgaagcagattctaagaggacaaaatttgcaccattttgttgtggccatataaaacagccaagcgaactggaagcatcccatctgagatgggtatcagcctagaacgattggatctgcaattttaatgataatgtgctcagtctcattaaatttccctcttttgacttctatgtttcacatgcacaaacatgattatctacagaagaaaattaaatgttgggatggtcttgcttttggaacatgtgttgtttgttctagtgtttaccttcactttctagtttcgaaaatgtctgagttactttgcagaaaacagtgagtgaagacttttaatgtctttgattttctaaatgatattgtcaacagggtttctgatttaggtggttctgttgcaactggtgatgaccatactgtcactaagaggtttgtgctctgattaatactcatgttacttgcaacatgttttctgtgtggtgaattttgtttattttatattaggaaagatgatgataatgacagccacgaggagcccaagagaaataacaaggtaatatatcaattacttctcagtagttagcttaaatttttcttgtgtgattgaaccttctgctgagtaattatctcttgtctatgcagactgtgaaccttttgctggtaacaaaagaatttacttcagtcattcagtcattcgggaaattcacaagttgcttcactgacttgcgaatacaagtacatttaatatatagtctgtaaaccttactatacaaagaaccaaaactatctggttttcttaaaacttttggttaaaactgttgttgtaattgagcaaactttttgttttcatgatttgcacagagcctggacattgcagtggcagaggaagggctatcaatgtcagaattcagaagagaagcatgaggaataccctgaatggtccttgtctgatatggaaaaaatgacattgatcccatgcaactagctgattaacttaaatggaaggattgatgaagatgaagaggattatgatgaagaaatgtagatgaacctgttttggttcagaaagttataattgagaactagagtagaatttttaggagtagtattgtacaaatccttagtggttaggaagattaggagggacaggacattcaaaactttagtccttacaacctttgttttgtgaaaaagtggagatatagattgttccaattagaaaatagccacggtattgttatttgagaaattttaatctcatataggttacagtaggcactacattcagatccttaaacttacggattttgattttgttttagctttgattgtggcgttgtgtatgtaagtcgatctattattgtatcaaaaaacgtgtcgtctcgagtacaatttgagagcaaatatgcagagcaaactcactgatccgaccacatgatttgcacttgaacctttttgttatcttgaatttgatgagaaatgagataaatggaaaagaaataagagggatagaaataaaaatttaatgtcaatacactaacaatataaaacagtttttaggattttaaaaattatcatctaataataaattatcattttaaaaagtcaataaatttatattacataatgaatgatgactagatgactgcgtaaattttttacactctcaaatacatcactcttctctgcaaataaacacaaaataagatgaaaaggatgtaccatttaaatggatagaaagaaaaagaaaaaattgtaaatttttatttgtttgaataaatacgagactagnnnnnnnnnnnnnnnnnnnnnnnnnnnnnnnnnnnnnnnnnnnnnnnnnnnnnnnnnnnnnnnnnnnnnnnnnnnnnnnnnnnnnnnnnnnnnnnnnnnnnnnnnnnnnnnnnnnnnnnnnnnnnnnnnnnnnnnnnnnnnnnnnnnnnnnnnnnnnnnnnnnnnnnnnnnnnnnnnnnnnnnnnnnnnnnnnnnnnnnnnnnnnnnnnnnnnnnnnnnnnnnnnnnnnnnnnnnnnnnnnnnnnnnnnnnnnnnnnnnnnnnnnnnnnnnnnnnnnnnnnnnnnnnnnnnnnnnnnnnnnnnnnnnnnnnnnnnnnnnnnnnnnnnnnnnnnnnnnnnnnnnnnnnnnnnnnnnnnnnnnnnnnnnnnnnnnnnnnnnnnnnnnnnnnnnnnnnnnnnnnnnnnnnnnnnnnnnnnnnnnnnnnnnnnnnnnnnnnnnnnnnnnnnnnnnnnnnnnnnnnnnnnnnnnnnnnnnnnnnnnnnnnnnnnnnnnnnnnnnnnnnnnnnnnnnnnnnnnnnnnnnnnnnnnnnnnnnnnnnnnnnnnnnnnnnnnnnnnnnnnnnnnnnnnnnnnnnnnnnnnnnnnnnnnnnnnnnnnnnnnnnnnnnnnnnnnnnnnnnnnnnnnnnnnnnnnnnnnnnnnnnnnnnnnnnnnnnnnnnnaaaaaaacgctaaacatttctccctccgtttcacgtcttttagtgagaaatatgatttggttaggactcattaattataatttcatttctcattttctaacacattcaatcaagaatatttttttattactttatttctcttcattttaattttatatttattataattttattgtatatagtaattcttttcaaatcgagtaggattgagtctccgtgaaaaatgaatgtgtagtaaaaaaaactttttctgcgttatgatttgctcccttcaccaaccgcatggtaggaaggggaaaagctttgacgtgggttatgcagcatagtctcaaattaaggcgggaacaataagaaaggtaatatttcatgacatagaaaatgtagaataatctcaaatttaaacacaagcttcattgttccacaaacaaataataatacagtgccttaaagttatgccaatgtctgtaataagttagtcctgtttggacaaacgataaaatctagaccacaagtgtttgtttaaaaattcaaattgaaagagaagaaacagaaatattgggaaagcccccattgaagccactgcataagaaacccatttggaagtagtgtgatcaaatatcaaaaaggaggctgcagtgaaagtcacaggcattacagcaacggagatattaagtaacaaacgcccaaaagtcaagctgggatgtagtgatatcacaaaatcgctttgtacgaatcttgatgaagttaaatatcgaaagaatgtgagtaaagacgcagaagaagtgcataataagaatgcatttgtcaatatgaagaaagtaaaccaggcattggtcttatcacctggaacagtcagagcagccgcaaatgctacggtagcaacaagtgttgacaccagcatgcctgattcggctattcctttggctgcatccttaatttcttcagataacttcttgtgttcatcataaaatacatcaattggtttcttgcccatgttgtttctcattattcttagttcacgaggaacatgccactccacgtactatttacaaatcaagagtatatgtaaatgatggtatccaaatgcataacttaattaatctttaattcaattatcacttaataactagaacaaattacagcaacacctcttaagatctagtgtaattacacaaacatttcctgaggtattagagtaaggtttgaggggatgttactggaatgtttttaaaaaatataaagaatgttagtgtaatttttcaaacttaaaaaaagttagtgtaggcaaattaaaaatggaattacatataattacacaaaacctgaggagaattattgtaattttctctaataagtattgcatattaaatttgtaagaaatacaatttcaaagttaagatatttcaaaaataaatcttacaggtgatatttgttgttacaaatgcacttatataatttttaattaaaattttctatctatatattggctgtttaactattatgctaaagacaatggtaacaaattttaaaaaattgttaccataatcaacaaatactacataaaatgatttctacttttaattaaaacttgttacttttaaaaatttaaaatcagtctagttaacaaaagtctaaaatttgtggaatttgtagaattattgtaatttgctttaataactattacatattaaatttgtaagaaatacaatttcaaagttaagatattttaaaaataaatcttgcgagtgatatttgttgttacaaatgcacttctataatttttaattaaaattttctatcgatctatatattgcctgtttaattattatgcatgctaaagacaacggataacaaattttaaaaaattgttacaataatcaacaaatactacatacaatgatttctatttataattaaaacttgttacttttaaagatttaattaaaatcagtctagttaacaaaagcctaaaatttgtggaattttaaatttttaaaaaaagattgctagaactcatggatcccatgcgagtgaataaagaatggttgaataagaaaaactaagcaaattaattgaccttgaaccatgcgagatctctttgcatttgattgcttgctcttaaacttgacaaatcttcgaattcagctggtggaagatgcgcagcaaagtgtagaatgttgttaccttcatagtccactgctcgtactagaggctcttttaatccccatggtatactattaaatattcttttttgttgaaatagcacaaccaagtgcagtaggttccgtccattttcggggtcctttattgtcactaattcaggctgaatttcaataatccattgcacagcctcaacattttctgattttattgcatcaaacagcactggcgacattatcatccgcttatgttccaattggttaacttgagtccatacttttttaaatagccgaccaccttctgatctctcgcccttcatgtctagtaagaggtatatatatagttgattggtccaaccaatgtttaacatgaaatgaaacaaacaaaacttgaatttaaattttattcttatatataagaagcaccattttttttatctctttaaaaaaattatatattttaatccgtacatgaaaaaaaaattgtaagatattttttcacatgtggctcatgtgttgccaaacattaatttgtgttattagaataactcaacaaacatctaataccattattacactggatatagatatttaaggactaattcttaatttttttttatataaaacaaatatatataactttctaaaataagaatcaaaatggaaattaatgatgtcaaataagacctaaattttagcttagcacacacacacaaaaataaaaagccattttcaacatgtgaaagcttacctaatttttttggagactttcgcgccagcatatgcaatgctgtaaggttctcttcatttcttgcaatggccagagtagttggatgtttttcaaataatcgcattgccaaatctgttatatgcacaaattaagtaaaactccaactaaattgaaaaaccacgtacttagttcatatatatctccttttatatatctgttatatgcacaaattaagtaaaactccaaccaaatctgtctcgacgtattgctagatgaagagctgtgtctccacttgagtttggtattagcatgtcttctggcctcatacggttaaccaactctttcacaatttcaaggctgccgtaacgtactgctagatgaagagctgtgtctccacttgagtttggttttagcatgtcttctggcctcatacgcttaaccaactctttcacagtttcaagactgccttcatttgctgctatatgaagagctgtgtctcctattgagttttgtattagcatgtcttctggcctcatacggttaaccaactctttcacaatttcaaggctgccgtaacgtactgctacatgaagagctgtgtctccacttgagttttgtattagcatgtcttctgccctcatacacttaaccaactctttcacaatttcaaccctgtttttctgtgctgctagatgaagagctgtgtctccacttgagtttggtattaggatgtcttctggcctcataagcttaaccaactctttcacaatatcaaggctgacgaaacttactgctgcatgaagagctgtgtctccatatgagtttggtattagcatgtcttctggcctcatacgcttaaccaactctttcacaatttcatccctgccgtaacttactgctagatgaagagctgtgtatccactatcatttaacggcatgcgtaccatatcaggacatttttcaataatctgtttcgatttgagccactctttccagcatatatgtgtcctcagatctacttttaaacaacctgcaatcctttcaaacttcacattataatttctcgtttaccctaaatctgtaaaaattctcttggaaacttgtctcaaattttgaattcctaataatttcatcatttgtaaattgaaatctagttgagaaattcgagattatgtagtcgaagggatccaatcatcaatcacctttaattaagtttgaaaattgaatttcaatttgtgtttgaaaattaattctatgatgataagtaaaattgtttttgagagaagtaatttattttttcttttcttcagttgacaaaagctaattgatcataacatgcgacttatacttatttatactcatactttaaaagtgattctacttttttttatctttcaaataaaataataattttctaaaccagttgtttaaatatcattgttataataatagtatagatttattttttttaacgtcaagcgatttcaaattcatttttttcaaaatgtaaaataaaaaactctaagacacgatctctgaaatgcaccttgttgtgaatgcaatagtttaaagtataacttactcagctcttctggagtcatttcattcacccctctactttcatgttctggtgtcggtgagtttgttgaagtggcaattggagtttgctcatgactttgattaagagtatgatctggtggaatctgaattatgtggtcttctgaaacttcgatattggagtccatgatttaattctagggaaaatgaagtgaattggatacctctctgaaattccctgttctatcggtgttgcttctttttttccagcctgcgaatcttgaacacattatatttggtggtaaagcaagagtccttaattagttttccaacttacacttaaaataattattcccaatatgacattttgtggattacagcaatgttcaatctgttcaacacctcaaccctacagttttcaaaagctttttaagttgaatgatttctaaatttgtaatattaattctttttcaaagagaataaatatattcattaaatttgttaactgaaaaaaaattatacacattaaattgtgtggattaattagcgagactcagctatcataacactgttaattaacttactctcaatttaatattaactttcttctttggacaatgatatgatcgatatctttacacacctaaaaattaaactacacaaactatcccttaagttttgtgaaattatataaactttcttatacttttttaaacatttacaacaatctcgcttatagttataggggcagaaaaaacatgaaaaatttgtataatttcatgaagccctataaaaatggttaatgcaatgtattcttttttaaatgtgtaatggaagaaacacttacgcatagagatgttgcgcaaattgactcagtaaaaaaacccaaaccgaaccaatttattcaaattattttgaccaattcattttaaatccaaatagccaaattactatagaaaattggtttgaaatggaattagtttaaaaaaaatagtttgaattgaattgattttgaattagttttaaatcaattttaaaattagaatagttttgaattgatatttgaattattttaaaaaaattgatttggatgaaaaccaatttgattaatcgaaccagttttataaaaatgattcggttaattgaacaaacttttttacaacagtgcaattcatcttttttaaaccagttcagattaatcaagttgatttttttaactcccctatttacggatgtattgtgctttcagaacacctatttagtaaccaaaatatgaatgcatattacgtaagtacatgcaaaaataattataaaacatgtgattaggagcatatagtacattatgggacatttagataaatataaatgtatttcaaaattcaagtattttgtaatgatattttaaatgtgttctagaagagatattacagaacatcttacggagagatgttctttcagcacacctattccataaccaaaatatcatactttcaaaatgcatatattatgtaatatattaaaaaataataacggaaagggcattttaaacatctaacgaatatgtattgttcttctgacatacgtattaacctatcatatttcccagaatgcgtattccacaatacattaaaaaataattacggaacatgtaatctagaaataataatgagaagtattttaatttgggagtcactcttaagtgagaaaggaggtgtaacgtaagttaatttttataggatgcaggaagaagagaaaagagacaactcaatgttaataaagagagaaaaaaagaaaaggaaacacacaaaagaaactagagtggaccaactcaaaggattatgaaaggaaactagcatgcatcacagttatatatatacaaattaaaggttgaaggaaagaaatcatgcccaaatgtcttgttaatgaagaacgatggagataaagaaatgcccatgggatgtgtgaggacgacccttgtcttgttgttgctgtacgttgatcagtgtctgagtgacgagggagcggtttctgagcaatgtgttattatatgcaaagagagtgaagctttatgagacataagggtgtgtgtgcctgcagatgaggctgtggactagatataatttattaggtggtccggaacaaacactatcaatatcttcactgttttttatatgacatatagtgttattatttttttcataaattataaactttgaatgcatgttatgtagacattggttgagattatgaatacaaagtgattccacatacactatttaattaatttctcgtggctggcatgtgccatgacaaaaaaaataaatttgttgagccaggcccggccctggggcagggcgagcggggcgcccgcccagggcccaaatttttttatcgatagtttaagtaaaaaataaataaaaaaaacatatattaggggttcattttatgtgttagggatccatttttttcattctttagttttaatattatttgtatttcaaaaaaattgtatgttaggggcccattttttccatcccttagttttaatattatttgtatttcaaaaaaattgtgtgttaggggcccatttttttcatcccttaattttaatattatatttatttcaaaaaaattgtgtgttagggacccattttttccatttcttaattttaatgttatttgtattttaaaaaatttgtgtattaagggcccatttttttcactttgccctgggccaaagaattttcaggaccggccctgtgttgagcccacatgcaaataacgtgtactgattttttgagtgggaaaaaattaagcaactgcagtagacaagggaaaacattcttcttctttacccaaaattgttaccttttttgtattttaatatttcctatacctttttcatttatttaattttttacttatttttatccattttttgaggcgcatatttgaaatgtactttagattagttgtaaagctaagcaaattgccttgttagattcttcggaatgtcattcttcaccttccgagaaggcagaaggggtcctttattcctttgttaaaactactgcttccatgtattccatactaacaaaattcttttcccactaggtgggggtggaatatatggataaaaattaaaaagccacaatgtcttattataaatcatgccataacactaatcattcaaatataattaatatagtttttcttggtctctccccactacaaaaaaataatatatttgtggtggctaaaaaatctatttctgacggctaaaaatcgccacaaaattaacttctgacggtcaggatcgactgtcagaagtagcaatgtcagaaaacattgtggcggcttttagaggaatgctggtaaatatgctagaaaaattgtgacagttaaaagccgtcacaaaatttattttcactctttttttacttttcacgttttctatttctggcggtttagaaactgttagaaagtgtttttttcggaaaaatagtattatttttataaaaaaaattatattcatatttctctagttttaatcattttcattagttctataattatttttaattcctatttgattaagtataaaaattgatataatgtattaatttctattctctcaaatttcaatactataataattattgtaattattaatattacaacgtgtcattaaaaatatcaaacataatttacaacatgcactgcaaatatttttaaagacttttgcagtctgaacaacactaatgatgcaccccattttactacatgcagcgcaaatagtttcaagacctgtgacagatatcaagcactacagcctacaggttcatatcactacatgactatttggaaggaaccatatagagtgcctttttcctcttttgtgagagagtttacactgaatttaggaagccaaatttttataaacatccacaagctccatcatgagatcatataagttcgaaaaggcactatccaacaccattccagcaatagaagggtcttcaggtccataaagaagactacatcacaccaaagtaaaagggaatagtcaattaaactagagatgtggatataaggctggctcataattacatgtatacagagtaaaggtaagactataagatactaaaaaatctagtgacttggccatcaaattttttaaaaattatgtattcaaaaggggcaaaataagctattttcttcttcttttccaccaatttctcaaaggatccagctaagtgctaatgaatgccctaaaatcattggttaagaatcaacgaaaaaaacttttattggaaatcatgatggaagtacactgataatattttttcccacaaaatttccacttttgatttcttaaacagtgtcctaaaggcatttgtttgcattctcctttctcaaataattaaaaaaaaaaaactcccataggaaggcctcaacagttttgcccacacatacacatacagagatagagggagaaataaaacttaggtcaagaaattatactattgtaggggtatgcatagcaaatataaagtatcaaagaagcagaaattcataaaaacaatatcaaacaagttaattgggagattacgtagtaacaacacccattacctatccaagatatttgtttgttgctcctcaaatgacaccctcatcttgaaatcatctttctaccactcaaaggaatggacacgtattggtagtttcagaaaatatggaatataaagaaactcaacttaataactgatgtgttgctaacacatcttagtttttaggttgtatttagttagatttcaatcaataatcaagaatttaggttagaattagttaagtttaattaattgttgttattatctcatgataacactaaattgtgcattttagaagcaaaaagaggagaaaagaagcagagaagcaaaatttggaagcctcgaacacatcgcgcgatcaacgtgggatttcatgcgaatcgcgccaagattccaagtccaagcctacagctcgaacagatcacgcagttagcgtggatatccgtgcgggtcgcgtcagaaggccaagaagccaagtccatctcgaacaacccacgtgagtagcgctgttggccacgcgaatcgcgccagaaacacagaagcaagctattccattcgaacagatcacgcggttagcgtggtagctcgcgctggtagcatcagaacgactgaagagaactcaagattcgaacatctcacgcgagtagcgtgagatgtcgcgccaggattatttggtttccttatttaaaatatttggcacgaaattaataaagattgagggctttgttaccttaattaaaaagaaggacgaaaaatagcataaaaagggggcctttggactgataaaaacaatttttgatacacaaattcacagggaagcacagtggagaaaagatcaaggccagaatttgaagaagatttatgttcccactttctttgtacttcttgaggttagacatgaacatgtctggctaagttcttttattatggtgaaagccaaaaatcaatgtgaactcatctataatttgattggtgttaatatgagattattatgattgctttgttttactctactcttcatcgttaatatctttcttagaattggtcattctatttaagttcttaggattagaattcgcaataggaatgttggattctaatttctgacaggagtaaaataacagtttttatgataatcacagtgaaaccaagcaaagcgttaaaaaaaagatgatatgataatcaaccttgccatcagttagtatgagactccattatagttaattgcagaattggaggattatatacttatgagttcagactaaataaggaagaaatttccttgcattacatattaaattgttgacttctgttataaaatatagacaacttcgcattcagggagcactactacaaaaaacacttttcacgacgcaccttctaagacggttgttgaaaaaccgtctttgaaaaaatgcagtggcatttttgtaaataaatataatcattctaagatggtttcgcgaatttttatgaaaaaacaatttggaaagtgaattgactttgttaattttttttcttctgttttcttttattatttttaaaaggggaagcaattggttttgggtgagtgggattcggttaggcaacatttggaaacacattcaaactagcttttatgtgttatagggagctagaaataaataaaaattgagtgatgtgggaatgcagcatagatgggatcatggaacacattcaattcaaattcacacttgagtgactcagatgaaatcaaactaaagaagtaacaccaattaatgcaagaacacagtttggaacccttttggcccccacacataatggcaaaagacacaaaggaacaccaagccaacgtcacccatttcctcagttcaaacttgaaaaccgacaacagggaatttagcataaaagtcagaagaaaaaaaaagttgtgaatcctctctttaaccccaatgttcccacagtaacataacacaccaaatcctaatcataattaatcacgttccattatgtcaaatataaaaaacacacacctctttgcaacttaaaaactttaattaaaggggaaaaaaactgaaaaggaaaaagaaaaaacagattagtgaaacttcaattgaaattacctgaagtaaacgcctaagtggtcttggtgggccacgagaagcatgagatggtgccaaggtgtttgcctccacgccactttgccatcactcccgatactgattttgtacccagaaacaattagatccaagcaccatagttctggcttcttttgccaatcaaaggaatgaattgaccaaaaacatttgacctgtaagacatgaaacaagagaaagaaattacaatttcatactggtgatggatctttcaaaaataacaacagaaaagaagtagaagatatgtctttataggcaaaagaaaaacgggggaagtaaaaccctaatcgaacatgaatgccgaaatcaccattgagggagacattgtgcgactcaaaatcaacggagagagtgcagggagaataacctagctcctctacaatcgagatcagaggcaaaagcggccaaatcgaactctgagaaaactcgatgttcatgcaatgtatcgggcaacactttaactcttgcactgcgtccctttattgctcgaatttgagagcccctgattcatgcgagagagcttttgtggcaacgagaaaaccacttgaatgatgaacccttgctttttgacttttgagtaataacaaataatgtaattttttaagttggtgtctaaatgatacgaagatatgaagtgacacgggacataatgaaaaagtgtaaaagaacaaaaataaatagtaaaattattttcctttgtgacaatttataatgaccgtcagaaatattttgttagtaaaacataacttttttgtagtgccccggcccctatctctaactaatgcgactaccctccatttgatcctgatgtacttcctttattcggattctataacttttctccacacacatgtggaaaatagacactaattaaggtcttatgtggcccaccttgtgttgttacattagccttgaccccattgtacatttctttgattgctcgaatatagacaatatatatacctttctatctccacaggaccataaccttgcgtaatatagtacatgcatatctttattataacttaagttatataacaagtgttggacttaaatcccaatcaagtccagctcaataagaaaaaaatattagggttcattcttttgataggtcagcagctaacatttaacggtgaatccattttctaaagcagacaacagtattacgagggacatttctctcatactaaccgttggatcacgttcaaactttgaggaaatgttaataaaatttgtttctacattctgaccgttcggatcattcattgaagtgttttcaagagggagtgtttcaactgcaaacagagattaccaaaattcctgatatgttctgtcttgtttcgggcagtgatattgagaaaaagttatctctttgcttaaccgttgaattattctcaaatttggtcagtgtgttcctctcttgtagtaattcaatttgaccgttggaatttgtgagtggttaatgctggtggtagaaattaatttcgtagagaagtctattttgtatgtttgtctcttgtaatgttttggtacaacttttgttgaagttgtttgttgattgtaatggttgctgctgaaactcttttgtaatctcacttttttgatagtgaagaatttgagtggactccgaaatcggtcccgtgaattttacttctcacattgagaatgtttttcacattaaaaattgtgtgtattgcttgcataattgttatttgtgcataaattattttgtttgtgtaagatcattataacaggtccaagaaggtttttccctacaaaaagtacgtacaataatctgaaattcaaatagaaccttggttaattatttcacaaacaaattatacagtgtggacactgccaccttctatatgaaagctagtctttgcgagtaggttgctgatgaattttaggcatacaatagtatgtagaccataagaattcgaaagggttaaattgaaagagaagaaacagaagtacgtattgagaaaactctcattctcattgaagccactgcataagaaacccacttggaagtgtgatcaaatatcaaaaaggaggctgcaacgaaagccacaaccatagcagcaatggagataataagtaacgcacgcccaaaagtcaagctggaatgtagtcatttcactaatctttcaattatcacttaataattagagcaaattacaacaacactttatgaggtttagtaaggtttgaggaaatgttaatataatgtttttaatataagagatgttaatgtaatttttcaaacttataagaagttagtgtaggaaaataaaaaataaaattatatataattacacgaaactaaggagaattattgtaatttgctctaataactatacatattaaatttgtaagaaatacaatttcaaagttaagatattttaaaaataaatcttacgggtgatatttattgtatcaaatgcacttgcataatttttaattaaaattttctatatatctatatatagcctgtttaactgttatgataaagacaatggataacaaattttaagaaattgttacaataatcaacaaatactgcatacaatgatttctatttataattaagacttgttacttttaaagatttaaaatcagtctagtaaacaaaagcctaaaatttgtggaattttaaatttttaaaataagattgctagaactgctcgctcccatccatgcgagtgaataaagaatgtgttctgctcggtgagaacagaaatgtccaacaagtgttgttggatattttctataggatcgggctctctctcttttaagaagcctatgaactgaagcaacttaaggaagaagatgatcacagcagcgatacacacgaagcaattggtgtgcagtgtgtgccgtgtgaaagcaaaagagagagtcagaattgtatgtgtgtgtgtgtacctttcaccatgggatgtgtggtatttataggattcaaacctggactttgatagcagacggttgagccccatatcttcttccttgatatgtggagatattgataactgaaagataatgctcatatcttctattttctggtgattatcttctggtagttatgatgacagaccaatagagatttaaacatttgaattaataggacaaaagataatatatgtttatcttttatccgtaacagatgcccctcagcccggtcatctagcattctgggtggccgggatgtatcagtaatggagccgaccatgctttttgggaagaacttgagcaaggttgatcgatgtccgaaccgagattgttatcatccgaaccgatatgtccaaagttcgagccgaggtgccgatcgtccgaaccgaggtgatcaagacccgagtcgaggttatcaagacccgagctgagatgagtttttgtagcttgaccgaggtgagtgaatccgagccgagatggttttcgtctgaaccgatgttttccgaggtgtgagacgaggaaacaattgtccgaaccgaggtgagcaagatccgaaccgatatacacttcgcatctgccccttgccgaggtgatcgatgtccgagttcgcttttgtccctctctccttgtattttattctggtgctttatttgctctttgcttctgcgtcttttgcattctctttctcttttgcgtatcgtggctccaattgtcgagcgtctatttggccgggaccactggtcgggctctggccgggaccactggtcgggctcttagatgtcgttctgggatctttgtcccgacttaacaactgttaacgtatttgtaacatcattataagtgtaattctttcggccgagccgatgattcacccatgatagttacgtcggcttgatcagggccgagataatacgaaacaacgactaagcatttaaatttgtgcacaataattttccttataacaaggattttatcaaatttcttcgaagattacatgattttcatgatctcaatgactgatttgcgcgggttctgcgtctccggatcaactaatgagaaacacatgataaatctattggtctcacatgaccccattgacgggcttgatggccaactaaaggggaacacatggtgagacaataatccatgatccctatgacggacttaaagccaactaaagggaaacacacggtggagttccgtgatcccaatgactgactgaaagccaactaaaggaaaacacatggactatctcggctgtgctacaatgtcttggacaacccggtacggtcctttccgatttgctgctgtccttccttaaacctcggtcggtcccttaccgaccttacttgaggtatttcttccgttggttggctgcgttgcctccttctctcattcccaccgtgatgacgttgcactcgaactcgggctctgagaattcttcgtctttctcgctcctcttgtcatttcgttgcttattttcctgctgggctttcctcttgccgtggtgcccttgagttcggatcacgtattgtcgcagtttgccttctcgcacaaatttttctatagcatcttggagctcccagcactagtcggtcgtatggcccggtccgttgtgaaaatcacaataccgggaatagtccagtccttgtttgcttacaatcggaggaggtcggttgacttttctcatgtcggtgaaggcgacctccttccatatttggccacgtgggacggtcaacggagcgtaattgtgatacttcaactcgtacctcccgggcctgggatgagggtcgagactgctccgaggtgatcggcctgctggggtattcgctagatgtcggctggacggtccgacctgggaattctcctgtcgtcggttccttggcgatgagggttcttcgttttctctaggagccgagttggcgatttccatctgttccaattccaagtatttcttggatcggattctgaactcatttaaggatttcactagatccttatatatggacttagcaaggcgggaggagccgttgagcccggccgacagaaggtggacgtggactttctcctccaagccttgtacttgcaaggcggcttccttaaagcggtctaaataactctgcagtgtctccccatgctgctggcgtatctttcccaaggcaaactcagatttcggctgcttcttgctcgttgcgaaattcagcaagaacttctggccaaaatcttcaaaatcgtggatggaccgtggcggcaaagagtgaaaccaggtctgggcggccccggttagagtggtggagaagatccgagatatgatgggttcgtcgattccacggacgcacatctgcatatcaaactcgtcgatatgtacctgtggatcttggctctcgtcatacttggacaagaaggagccgtcgaaatcctccaggaactgagcatccactatttggtcgatgaatgggctgttattctgatgccctcggcgatacttccttcgatacgtgccgtcggcttggccgggatgacgggcgaattttctcatcggcctttcttccgttggcggtatcggcgttatagccgaggatgggcgaagtgcctcgtggtgggaacgagacgctcttccctgttcggagtggtcaacgggatctctctggtcggtcccggctgttcgggccgacgtcgccggtctcgatcttctagctgttgcatggggctggtcggcttctgcatgatcttccgtgtggtcggtattttgccgacgcttctcttcccgtcttcggttatcgtgatcctccaactgagcaatcagccgctggatgtcttcctggcgttggagttcataacgcttctccagattctccattcgagccaacaaggattggagagcgttctggatgaaacgctgagaagtttctgggtcttcttgcgcggccggtggtgtgttggccggcacctgcgttgtaggtcccgcacgagatgaagctgtgtgggacaatgcgtcttccgccaccgcgttctccggattcggatttcggggtggttcttcacgtccggcgttctggtgtcttctggtgttagccattgagagttggtgggattcgaagtttatcgttcccacagacggcgccactgttctgctcggtgagaacagaaatgtccaacaagtgttgttggatattttctataggattgggctctctctctcttaagaagcctatgaactgaagcaacttaaggaagaagatgatcacagcagcggtacacacgaagcaattggtgtgcagtgtgtgccgtgtgaaagcaaaagagagagtcagaattgtatgtgtgtgtacctttcaccatgggatgtgtggtatttataggattcaaacctggactttgatagcagacggttgagccccatatcttcttccttgatatgtggagatattgataactgaaagataatgctcatatcttctattttctggtgattatcttttggtagttatgatgacagaccaatagagatttaaacatttgaattaataggacaaaagataatatatgtttatcttttatccgtaacaaaatggttgaataagaaaaactaagcaaattaattgaccttgaaccatgcgagctctctttgcatttgaatgcttgctctttccaagtgtagagtgttgttactattaaatattctttttaaaatatttaactttgaaattgtagatgctcttttaatccccgtcgtatactgttaaatattcttttttgtcgaaataccacaaccaagtgcagcaggttccctccatttatggggtcctttattgccactaattcactattcatgtcaataagcatcttcacaacctcaacatttcctgattttattgcatgaaacagcactggcgaagcataatcaggtatctactccattagaatcgaattacatttcaattcgttaacttgagtcaataatttttcaaatagccgaccagcttctgattccttgtagtagtcctccatgactagcaagaggtgtatatatagttgattggtccaaccaatgtttaacatgaaatgaaacaaacaaaacttaaattaaaattttattcttatatatatgaagcaccatttttttatctctatttaaaaaattatatattttaatacgtacatgaaaaaaaaattgtaagatatttttgcacatgtgactcatgtgttggcaaacattaatttgtgttattagaataactcaacaaacatctaataccattattacattggatattgacaattaattaaggactagttcttaatttttttatataaaacaaaaatatatataactttctaaaataagaatcaaaatgaaaatgatgtcaaataagatctaaattttagcttagcacacacacacaannnnnnnnnnnnnnnnnnnnnnnnnnnnnnnnnnnnnnnnnnnnnnnnnnnnnnnnnnnnnnnnnnnnnnnnnnnnnnnnnnnnnnnnnnnnnnnnnnnnnnnnnnnnnnnnnnnnnnnnnnnnnnnnnnnnnnnnnnnnnnnnnnnnnnnnnnnnnnnnnnnnnnnnnnnnnnnnnnnnnnnnnnnnnnnnnnnnnnnnnnnnnnnnnnnnnnnnnnnnnnnnnnnnnnnnnnnnnnnnnnnnnnnnnnnnnnnnnnnnnnnnnnnnnnnnnnnnnnnnnnnnnnnnnnnnnnnnnnnnnnnnnnnnnnnnnnnnnnnnnnnnnnnnnnnnnnnnnnnnnnnnnnnnnnnnnnnnnnnnnnnnnnnnnnnnnnnnnnnnnnnnnnnnnnnnnnnnnnnnnnnnnnnnnnnnnnnnnnnnnnnnnnnnnnnnnnnnnnnnnnnnnnnnnnnnnnnnnnnnnnnnnnnnnnnnnnnnnaaaaaaaaaaaaccattttcaacttgtgagcttacctaaaatttctggaggcttttgcgtcagcatatgcaatgctgtaaggttctcttcatttcttgcaatggccagagtagttggatgtattttcaaataatcgcattgccaaatctgttatatgcacaaattaaatagtacaaggcaaggtaattaaaaatttaaaactccaactaaattgaaaaaccacgtacgagttcatatatatctccttttatatataaatgaaatcaatgagaatatagcaaggacctgtttggttttaaaggatgatatcacagtctttcagaaacctaatagtcataattaattatttcaacattttgaattatggtcaaatgtaccgaatgacgttggaattataattagcttatggtatttgatcggttcaatgggttcgattcagtttgtaaaacatcataatatataaaagagaactagattaaaaaatgagaaataaggttgtttaattagttttacacttaccaaacatgattgtcattaaaaaaatttacttcagtcaatagggaaactcgctagtggcttgtgaatgcaagtacgtctaaatgtctaatagtctgtgaggctaggccccacttcaacttactacacaaaggaccaacactgtggttttctgaaaacttttgctgaaaactatagaattggcattaaagaacctggcagctgtttaatattaaacattatctgaattatggaactttgtttttttttcttcatgatttgcacagccagagcctggacataacagtggaagaggaaggggtaggggcagaggtagaggttgtggccgaggaattagaactgtagatcaaaagatgagttcacatgccaagtgtgaagatgattctgatgtattgaagcagaatgacaaccacactcaaagcaatgaaagcatggaaaatgtgccggaacctgaaggagttaagcagagttttccagtaagcaaaccggctgaagtgtccattcgaaattttgacttaaatttggaccgagatgaggatatggattcattagacacaccaacttctgtgagagaagcatgaggaataccctggatggtccttgtctgaaatggaaaaaatgaccattgatcccattcaactagccaacacaaatggaaggattgatgaagatgaagaggattatgatgaaaaaatgtagatgaacctgtgttggtttattcattaattacttctcatataggcccgtcattagaatgttcttatgtggaattagagtagattttataggagcagtattagatagatacttactccttagtagtttaggaagattaggagggatagggcattgaatactctccttataacccttgttttaggttaatagtggagatatagattgttccaattagaaatagccatttgccagtatagttatgaattatgagaaattttaatctcatgtaggtattgcttatggtaggcactacattcagattttgggtgtgttattgctccaacaacatgatttgcatgcaaccttttgaattttagttatcgtgaacttattgcacgatgagacaagaggaaaagaataagacgttagacgaatagaaatatatacgaaataaagtgaaaaagatgtgttatttagatgaataaaaatagaaaggaaataagtgtagatatttattatttatgtttgtttaggccaaatgaaagagaaaatacaaacaaatgaattgtttgaaaaaaaaattatacatttttttaaaactatttccattatttttctaacataagattattattttttattatataatatacttatttgattttaaaatgtaagcaccactaatcgcttctctataaaactaatctcgcctcaaactagttggtttaaatttcaaacaattatttttaaataagcacttatttaataaataaataacgttgatcaaaataagtagaaaactgttttttaagcataaacacaatttagacaaatacattaaaaaactgaaaattatttattttattaaaataaatatttttttcaacaaataaatttaagcatacttatcaaataatatcacttgatttacaagcgggagtttggccaattagtacacgtcagacaattataaagaatgatttgaataattaacttattaatgtgggacttgtatgtgcctaccatgaggtgaacgttatctaaggtggaacataaagaatgttcttatggttttgaatctacttggaatactaataagaggtgaaactaaaattccaaagtacagttaacttggtcgtagctctagatccacattctcacatgcctccgtccctgattggagatatatgaagtttatatttaatatggataagtcctaggaaaaatagaatagccgggactcaatctcaaagtttggaataactataatttcttattaaaatgccgatctaaatggttcttaataacagtggttgtgagttgtgacatatacttgctcccttcaccaaccacagggaaagaaggggcaaagctttgacgtaggatatacagttttcggaaaaggcattatagtctcaaattaagtcggaaacactatgataggaaatgcacaatatcctaaattcaaagactaacttaattgtttcacaaacaaatatataacacagtgtggacactgccacactgtctataaatcaagatacagaaaatgacgagaaagttttagagtttgccagtatctataattatgtaataagttactagagttcggatggaagataaaatctagacaagtgtttgtcgaaaaagttaaattgaaagagaagaaacagaagtattgggaaaaccccattaaagccactgcataagaaacccacttggaagtgtgatcaaatatcagaaatgagactgcagtaaaagctgtagaatatcaaaaatttatgcagtgagaacttgtggagaaaacaacttctaacaaatattttattcaacttatttctctttctttctatcttttcttttctatctatttttctttctcttctctatcttttttttctctctcatattattaaatattataatgatttatttataagttataatatgcctttcaaaattttaaaagacttaaatcttattaataaacataacccacaatcaaaatctcattatagttatttataattataaactacaatcaaaattcattataatcattcatagttataaattataattattattaactcttgacctttcatttttgtaaaacaaaattgttaatgaaacccattaaacttttaagtttattcaacaaaagctacaaccatatccgcaacggagacaaaaagtatcgcaggctgcagtaaactcgctttctgcaaatcttgatgaagtgaaatttgacaagaatgagagtatagacgcagaagaagtcaataatgcgactgcatttgtcaatacgctcattggttgggatcaattaatatcaatgcataacttgattaatcttttaattacacttaataactattacaagttaattttttaagttatgatattaaaaataaaaaggaattgacctagcttgaaccatgcgagctctctttgcatttgaatggttgctctaaaactggacaatgctttgaattcaagtggcagatgagcagctaagtgtagaacgttgttaccctcattgtccactgctcctactatttgctctatctttttaagtatactaaaaaaatgtttatttttcgatatagggcagccaagcgcagtaggtttcgtcgattgttgggatcccttgtcatggtcactagtttactattatcgtaaagaatccaaccaagagcctcatcatttcgatatatagttgattggtccaacaaatatataacatgagcataaagaaataagttaaattaaagtttggtctaatatgaaacattatttttttgacacacacatcattaaataaataaataaaacaccattcgcaaccgatcatgaaagcttacttagaatttctgaaggctttcgccccagcatatgcaatgctgttaacttctctttttacctcttcatctgttgcaatggccaaatcaattggatatttttcaaataatttcattgccatatctgttacatgcacaaattaaatagcgatggtagattgcatatgtacaaggcaaggtaaaattgaaaaaccacgtacgagttcaactagataaaaaaaaggatgtttggttttacacttaccaaacatgttgctgctaatggtcataaaaaaagtcgttgaatatccttataaaccattttgtgaagaggacaaaatttgcaccattttgttgtggccatataaaacagccaagcaaactggaagcatcccatctgagtttggtattgttggataccaagtaatcatacaacaatcgagataggagaaggagagaaaagagaaagagaaaataacacaagtttatcctgattcattcaatatggactacatccaactattacctatatttccttacacactataaagcactcagattacaagaaaatatataggcttagaaatcttaaacatagtaactattcatgcacttaagcccaaattacaaataataaaacaaagctagtgtgagtcatacccaacaagtatcagcctagaatgatttgatatgcaattctactaataatgtgctcagtctcattaaatttcccttttttgctttctatttctcatatgcacaaacatgattacggctttataaccatacctaggattttttttaaataattagattaaaaaagttatttataattttttaaaaaaattatgatttaaaaaaacataaaaaagtataaaaaagtaaaaaaaaaattgaagaaataaaactaaaaaaatgtaaagaaagaaaaaatcataattttaaaattgtaaaaaaaaattatgacttgaagttataataaaaaaaaattaaaaaaagttacgaaaatcataaaaaaatttatgactttaaaatcgtatgttaaaaaaaattatactgaaatcgtaaatttatttacgacttcagtgaaaaaaattaaaataaatataaattataagtttgtaacctttgttacgacttacggcatatatctttatgcaaaaaatttaaaatctacccaaatgataataacaataaaaaaaattaccctctaaaacccatgattagacgtgtaaatgatatctacggaagaaaattaaatgttgggatggtcttggttttggaacatgtgttgttgttctagtgtttaccttcactttctagtttctaaaatgtctgacttacttgcatccttgcctttgcagaaaacagtgagtgcagacttttaatgtctttgattttctaaaagatattgtcagaagggtttctgatttaggtggttctgttgcaactggtgatgatcatactgtcactaagaggtttgtgctctgattaatactcatgttactaggaacatgttttttgtgtggtgaattttgtttatttattttatattaggaaagatgatgataatgacagccacgaggatcccaagagaaataactaggtaatatatcaattcagactgagttggcttaaaatttttcttttgtgactaaaccttctgctgagtaattatctcttgtcaatgcagactgtgaaccttttgctggttacaaaagaatttacttcagtcattagggaaattcacaagttgcttcactgacttgcgaatacaagtacatttaatagtctgtaaaccttactatacaaagaaccaaaactatctggttttcttaaaacttttggtgaaaactgttgttgtaattgagcaaactattcactatagaatcagaactaacacataatgtggaaattctagctgagagatgcaacattctaaagaacctcgcaaaagcttgatgttaaatattatctgaataatgattttttttcttcatgatttgcacagagcctggcattgcagtgtcagaggaagggggtatcaatgtcagaagagaagcatgaggaataccctgaatggtcattgtctgatatggaaaaaatgaacattgatcccatgcaactagctaattaacttaaatggaaggattgatgaagatgaagaggattatgatgaagaaatgtagatgaacctattttggtttagaaagttctaattgagaattagagtagaatttttaggagtagtattagacaaatccttagtggttaggaagattaggagggataggacattggaaactttagtccttacaacctttgttttaggataaaagtggagatatagattgttcgaattagaaatagccacggtattgttatttgagaaattttaatctcatataggtcttgcctatggtaggcactacattcagatccttaaacttacggattttgattttgtttgggttgttagctttgattgtggcgttgtgtatgcaagtcagttattgtatcgcacgacgtttcctctcgagtacaatttgagagcaaatcgcagagcaaactcatacgacatgatttgcacttgaaccttctttgttatcttgaatttgatgagaaatcagataaatggaaaagaaataagagagataaaaataaaagtttaatggctatgtactaacactaacaatataaaacaattttaggattttacaaattatcattcaattataaattatcattttaaaaattaacaaatttattatatatacgatgagttgtactttgatgactatataaatttttttacattctcaatacataacatttatctaaaaataaatacaaaataagatgaaaaagatgtattatttagatgaataaaaataaaaagaaaaaatatataaatttttatttgtttgaataattagagagtataaaacaaaaatatggttattgcaaaaatgttcatacaaataaaaaataaaatttaatttgaaaacctgaactttttaattatttcgttatttctcaacataaaaatattttgttataaaacaataatttgatttttaaaaatttaaacatttaaacataagtaaaagaacactgctaaccatttctccttccattttacgtcacttggtgagaaatattgtttggttgagactcattaattataatttcatttctcattttctaacacattcaatcaagaatattttttattactttatttctcttcattttaattttatatttattataattttgttgtatatagtaattcttgtcaagattgagtaagattaagtctaagtgaaagatgaatgtgtaataaactgtgttatgatttgctcccttcaccaaccacatggaaggaaagggaaaagctacgaagtgggttatgcagtatagtctcaaattaaggggggaacaataagaaaggtaattaatatttcatgagatagaaaatgtagaataatctcaaatttaaacacaagcttgatggttccacaaacaaataataatacagtgtcttaaagttatgccaatgtctgcaactctgtaataagttagtccagtttggacaaacgataaaatctagaccacaagtgttcgttgaaaaagctaaattgaaagagaagaaacagaagtattgggaaaagccccattgaagccactacataagaaacccacttggaagtgtgatcaaatatcaaaaaggaggctgcaatgaaagccacaaccaaagcagcaacggcgataataagtaacgcacgcccagaagtcaagctgggatgtagtgatttcacaaattcactttctgcgaatcttgatgaagtgaaatttgacaagaatgagagtaaagacgcaaaagaagtgaataatgcgactgcatttgtcaatatgaagacagtaaaccacgcattggtcttatcacctggaacagtcagagcagctgcaaatgctacggtagcaacaagtgttgacacaagcatgccagattcggccattcctttggctgtttccttaatttcttcagataacttcttgtgttccttataaaatacattcattggtctcatgcccgctttgtttctcattattcttagttcatcaggaacattccgctccactaactatttacaaatcaagagtagatgtaaatgatggtatccaaatgcataacttaattaatcttttaattatcacttaataactagagcaaattacaacaacacctcctaatatttagagtaattacacaaatattttttgagatattagagtaagttttaaggggatgttagtgtaatattttcaaacatataagagatgttagtgtaattttttaaatttaaaagaaattagtgtagaaaaataaaaaaatggaattacatataattatatgaaatctctggaaaattattgtaatttcctcaaatagctattacatattaaatttgtaagaaatacaatttcaaagttaagatatttaaaaaataaatcttaggggtgatatttatttttacaaatgcacttgtattatttttaattaaatttttctgttatatattggctgtttaactattatgctaaagacaatggataacaaattttaaaaaattattacaataatcaacaaatactacatactatgatttctatttttatttaaaacttgttacttttgaagatttaaaatcagtctagttaacataagcccaaaattagtggaattttaaatttttaaaataagattgctagaactgatcgatcccatgcgagtgaataaagaatggttgaataaagaaaactaagcaaattaattgaccttgaaccattcgagttccctttgcatttgaatgcttgctcttaaactggagaattcttcgaattcaccttgtggaagacgcgcaaccaagtgtagaatgttgttaccatcattgtccactgctcgtactagaagcccttttaatcccggtggtataatattaaataattctttttgtcgaaatagcacaaccaagtgcagtaggttccatccatttctgcggtccctataagtcagtaatctaggatcattgccaagaagcatctccacagcctcaacatctcctgattttattgcatattcacgactctgttccaatgtttcaactttagtcaatatttctccaaatagccgatcacaaacgactgattccttggcaaacattaatttgtgttattagaataactcaacaaacatcaaataccattattagactggatatagataattaaggactaattcttacttttttatataaaacaaaaatatatataactttctaaaatcaaaattaaaatggaaatgacgtcaaataagatctaaattttagcttagaacgcacaaaaaataaaaagccattttcaacttgtgaaaggttacctgacattcctctaggcttttcccccagcatcttcactgctgtaacgtcctctacttcatttcttgcaatggccacagttggatgttttttaaacaatgtcattgccgcacctgttatatgcacaaattaaatagtacaaggcaaggtaaataaaaacaccaactaaattgaaaaaccaagtacgagttcatatatatctccttttatatataggaaatcaatgagaatttagctaggagctgtttggttttaaaggatgatatcacagtgtttcagaaacctaatagtcataattaattatttcaactgattcaatgggttcgattcagtttgtaaaacttcataataggtaaaagagaacgtactagattacaaaaaggagaaataaggttgtttaattagttttacacttaccaaacatgtcgaacctaatggtcatcataaacagtcgttcaatatccttgaaattcattttgtcaagcacttcatcagaggacaaaatgtccaccattctgtcggaacgaattgcagcagccaagtgaactggaagcatcccatctgagtttggtattatcatgtcttcgggcctcatacggttaaccaacactttcacaatttcagagatgtatttacgtgctgctacatgaagagctgtgtctccatctgagtttggtattagcatgtcttctggcctcatacggttaaccaactctttcacaatttcaagcctgcattcccttgctgctagatgaagaactgtgtctccatctgagttttgtattagcatgtcttctggcctcatacgcttaaccaactctttcacaatttcaagactgccttcccttgctgctagatgaagagctgtgtatccccttgagtttggtattagcatgtcttctggccttatacgcttaaacaactctttcacaatttcaagactgtctcctcttgctgctacatgaagagctgtgtctccacttgagtttggtattagcatgtcttctggcctcatacgcttaaccaactctttcacaatttcacccctgcctttgcttactgctagatgaagagctgtgtttccacttgagtttggtattagcatgtcttctggcctcatactcttaaccaactctttcacaatttcaagcctgccttcccttgctgctagatgaagagctgtgtctcctctatcatttaacggcatgcgtaccatatcaggacattcatcaataatcgattttaattggaaccactgatccccaaatacatgtcttatcaaatcgttttttaaagaacctgcaatcctttcaaacttcacattataacatgtcctttatttaataatcacaacttttagtatttagttccaaagaagacccttttaatttctcgtttaccctaaatctgtaaaacttctcttgtctcaaattttgaattcctaataatttcatcatttgtaaattgaaatctagctgagaaattcgagattatgtagtccaaggaatccaatcatcaatcacgtttgaaaattgaatttgaatttttgtttgaaaatcaattctatgataagaagtaaaattgtttttgagagaagtaatttatttttttcttttcttcagtttacaaaagctaattgatcttaacatgtgacttatttatactcactttaaaagtgattctacttttttatcattcgaataaaaaaaataattttataaacccattattgaaatatcattcgtataataatagtataactatatttttcttaacgtcaagtggtttcaaatttaatttttttcaaatatgtaaaataaacaaactcttcagacattatctctgaaatgttgtgaatgcaatagtttcaagtataacttactcagcccttctcgagtcatttcactcattcctatactgccatgttttggtgccggtgagtttgttgaagtggcaattggagtttgctcatgattaggagtatgatctgaaacttcgatatcggagttcatgatttaattctagggaaaatgaagtgaattggatatttgtggattacagcaatgtcaatacaatctgttcaacatgtcaaccctagagttttcaaagtgaataaatatattcattaaatttgttaacataaaaaaatattcattataaaaaaattatattcattaaattgtgtggattagcgagactatcatgacactctgttaattaacttactctcaatttaatattatctttcttagctgtacaatgatatgatatctatacacacctaaagccttcaagttcctactcttatattgttgacgaaaactttctgccatagcggtggttatatatttatctaacttcagttgacgcatttaattctatgattatatgctaactctggtctttctatactagttataatcaactactccaacaaccattgaaacattcaaagctaagactagatgcattttattatcggaatatgtataaatttattaaactcactgataagtgatatcgtatcgtttcaaaacaattaaactacactaattctataacatattattaacctaggtcgactaagagacactatcaatatggtttcaacttcaattcactaataaacaataggagatttttgtcaaacagtttacatgcgataagtaaaaattacaaaaaacgtataaactaatgcgaattgataagaggtaatgtaaaacagattaaatagcatcaattcatacagttttcaagagctttttaagtgaatggtttctaaatttataatattaattcttttttaaattcaataaatatattcattaaatttgttaacggaaaaaatatattcattaaattgtgtggattagcgagactgaggtatcatgacactgttaattaacttactctcaatttaatattatctttctttgttggacaatgatatgatatctttacacacctaaaaagtaaactacacaaactatccctaaagttttgtgaaattatataaactttcttatattttttaaacatttacaacaatctcgcttatagtagttatcggggcagaaaaaacatgaaaagtttttataatttcatgaagccctaaaaatggttaaggcaatttagtcttttttaaatgtattgtgcaatttataaaaatgattcggttaattgaacaaacttttgtacaactgtgcaattcatctttttttaaaccagttcagattaattgaattgattttttttaaagacccctatttacggatgtattgtgctttcagaacacctatttagtaaccaaaatatgaattcatattacggaagtagatgcaaaaataattacaaaacatttaggagcatatagtacattatgggacatttagataaatataaatgtatttcaaaattcaagtattttgtaatgatatcttaaatgtgctgtagaagagatattccagctcatcttatggacagatgttgtttcagaacacctattccataaccaaaatatcatactttcaaaatgcatatattatgtaatatattaaaaaaaataacagaaaaggtatttcaaacacgtgacgaatatgtattgttattctgaaatacttattaacctaaatatcatatttcccagaatgcgtattccacaatacattaaaaaaataattacagaacatgtaatctagaacaaataatgagaagtattttgggagtcactcgtagattttaaatgagaaaggaggtgtaacgtaagttaatttttatattggatgcaggaagaaaacgcctaatgggaaatgtgagctcggtccatatgagaaaagagacaactctgttaataaagaatgaaaaaaaaagaaaaggaaacacacaaaagaaactagagtggaccagctcaaacatgtaataatgtaatgtaatgtaacaggagacaggttcacagagaggaaaggattatgaaaggaaactagcatgcatcacagttatatatatacaaattaaaggttgaaggaaagaaatcatacccaaatgtctttttactgaagaacgatggagaaagaaatgcccgtgggatgggtgaggaggacccttgtcttgttgttgctatacgttgctcagtgtctgagtgatgtgggagcggtttctgagcaatgttatatgcaaagagagtgaagctttatgagacttaagggtacggtgtgtgcgtgcctgcagatgaggctgtggactatttataatttattaggtggtccggaacaaatacaatcaatatcttcactgatttttatatgacatatagtgttattatttttttcataaattataaaatttgaatgcatgttatgtagacatcggttgagattatgaatacaaagtgattccacatacactctttaattaatttctcgtggctggcatgtgccatgacaaaaaaaataaaaattgttgagcccacatgcaaataacgtgtcctgattttttgagtggggaaaaagcaactgcattagacatgggaaaacattcttcttctttacccaaaattgttaccttacttttttgtttttgttgtcatcttttgtgtattttaatatttcctataccttttgcatttatttaattttttacttatttttatccatttttttaggcgtatatttgaaatgatactttagattagttgtaaagctaagcaaattgccttgttagattcttcggaatgtcattcttttcaccttccgagaagccagaaggggtcctttcttcctttgttaaaactactgcttccaagtattccataccaacaaaattcttttcccactaggtgggggtggaatatatggataaaaattaaaaagccacaatgtcttattataattcatgccataacactaatcattcaaatataattaatatagtttttcttggtctctccctatctctaactaatgcgactaccctccatttgatcctgatgtacttcctttattcggattctatagcttttctccacacatatgtgaaaaataggcactaattaaggtcttctgtggcccaccttgtgttgttacattagccttgaccccattgtacatgtccacctagcttgaactagggttggtaaaaatggtttgacctaatgggtcagttcatttggcccatgaaaaaatacggactgcactgaacccgacccacaaaaatgtaagtcaaaatcggacccgaactgggtcaatccaccaggccaacataaattttaaaaaaaaaacgaagagtccagtccaatagccacttagccaggcccagacactcaaatgcacaaacatcttatatcttcttcgtgagcgtgagtcgagacccactgtccactaaatgagacagagactcgtcaacgtcgacgtcgccgtcaccctgagcagctccgtgaccatgagcgatgagtctgtggccgtgagggaccgagggtgagtccgtcaccgtgatgactgagtgaggaggcaccttgagttcgttgttcgctgttggcactgttgcagaaagagagagatcccgctcccgctgtgctgcacccgcatcgcctgtttgtcgtccgccagaaccatcagaactttagaaggagcttaagcaccactggattgccaccaaccaccaccactaggtacggaggcaccgacagatctatatgggttgcagggtgggcagatgcaccccctaatttcaataaaatcactagtatttgtcctaaaatattatattttgcatcccataattttacattttgcaccctctaattttatgtatttgaatctctttaccagttcacatgtaagagtaaataaatacaccatcttattttaataaaatgcaaaaaaatattatattttgcatcccataattttatattttgaacccctaattttatgtatttgaatctccttaccagttcacatgtaagagtaagtaaatgctaggggtgttcacgggtacgggtcacccgtgaacccgaaccgatctgaacaatttgggttgggtcatttatatatttgggtcaaaatcgaaccgaaccgatcaaaaccgttcatgtacgggttgggtcacgggtttagatttacagattcgttgatccgatgacccaacctgtgaacccgtaataataatataaattttattatatatatatatatatatatatatatatatattaaaaattaaaaaaataatttgacaataaaaaaagatatgatattttaaatgtttaagattgcattcaaaaataagataggatattttttaatattgcattaaagaaaatgatagaatatttttaagattgcattgcataatataataaaatatctttaagattgcattggataatatgatagaatatatttaggattgtattcaaaaattggttaaaatcatatttttaaattagtatagatttaaatgaatcaattttactacttttatacatttgataatattgtgttaattgtatgagatatttgaaagaatcgtgatataaaatagtagttctaaaaaaaaaattaaatgggtaatccagtgatccgaaccgaaccgaactgttcatgaacgggttgggttgggttttaatttttttttgaaaaccgaaccgaaccgatgaaatttgactgggttgggtcctaaatttggtcaaaaccgatctgaaccgacccgcgaacacccctagtaaatgcactatcttattttaataaaatgcaaatatttatcttaaaactttatattttgtacatcttatcttcgtatttgaatccaactatcccatatgataatgatatcaatttttttaaataaattacccctactgatatattttgtacatcttatcttcgtatttaaatccaactatttcatataatgataattatcaatttttattttttaaataaattgaccccactgatccagggtcctagatccgccactttacggatgtatctttcgtttgttactctactcctttttattgctttttattttattcctttgtaatcgtttctgcaattttggtctgctacacgcctacacggttcggtccatgcatgcatttttttccctttggtgtccctttcgcacacttatcatcattcacttggatcacttcacatcctatgtacagttcctatttattttgatgaacaaaatctgtttgctatctgatgttatttttcaaatgtttcttctaaccctttggttttgcagctgccttttgatgaaagttttttgtttcttctgtattcaaaggatgatgtaagtttgagaaaatggaaggatcaacttcagggaagtgttgacatatctgttgttggaagtggtacttgtttttctcttcaactccttctgtggtctttttttttnnnnnnnnnnnnnnnnnnnnnnnnnnnnnnnnnnnnnnnnnnnnnnnnnnnnnnnnnnnnnnnnnnnnnnnnnnnnnnnnnnnnnnnnnnnnnnnnnnnnnnnnnnnnnnnnnnnnnnnnnnnnnnnnnnnnnnnnnnnnnnnnnnnnnnnnnnnnnnnntttgtaaactcttgtatatatacaagttctataatgattatttaacagagataaagtgacatttaacttgatggaatgatgggaacattacctctttattgcaagctattgttgaagatgatcctcttcttatctttatttcacttaaccaattctaaacacaactgagatggtttgcttttaaaaaaaacaaaacaagataaatcattttctttgaaacactaagtgaaatagacttaaattagcatagtcttccggttttcttaggttggctccaacctccagctttttttttttacatttatggtaaatgtcaaattgttttgaaaatgaaattcaccttcactgtctccaacaacatcgtttctggtctcaaatgacaaatacacaaatgttgtttggaaaattggcattagaggtgagaatactctgtctcgtctttactttgattaatttaatctttttctgggtggaatttactttaattgattaaataatgttcattgtaattcttttttcttgtttcagtggacagcagaaaaaagatgtcgggaacttttagtcccaagcaggaaccatatacatttgaattggaagaagaaaatgcttctgtaagttctgtttgtagattacgatcgaaaatgctacttggatgttacttactatcaaatcagaagaacagaccaacacctcaatgagatttaaactggagtaacttgttggaaaaaatttcttccttttgcattttgtgtctctttggaacagattgaaactcaacatgtttgtcaattagcatgattatattttttaattaaatttgtattttttatagttttttgttttttttaaattaacttttttattttttagatggattgaccaatccacctaaaaataggacgggttaacatttttagcttattttgcaaaaatagaccagtccaacccaacccatatttttggtgggttaaaatcaatccgatccattttttggtggaacttatccactttgccaatcctagcttgaaccatgggagctctctttgcatttgaatgattgctctaaaactggacaatgctttgacttcaagtggtagatgaagagctaagtgtagaacgttgttaccttcatgtccactgctcctatactatatgtcctatcttttattttcagtatactaaaaaaatgcttatttttttatatagggcagccaagtacagtaggttccgtccattgttgggtcccttatcatggtcactagtttactattatcgtcaagaatccaactaagagcctcaccatttcctgattttagtgcaacaatattaatattgcagaaaaatatcgtaaaacaagagcacaatcatcaacaaattgagtataacaagataacaacatatatttagacaaatttattatgcaacatcatctcattattaatattttttttagacaaatttatatgaagtatttttttatttaaatttttaagtcttttgtttatttatttttcttattgacaaaacaaataaaatccacaaaataaataataatctttaacattaataacaaaaatataaaaatattaaataaaataatatacaaaaatgtaaattaaaactactttagagttgaaaactaatttaaaaattaaaaaaataaaatgactttaagtcgttaaattttttataaatttatataaataattaaatataaaaaaaattaaaatgtgannnnnnnnnnnnnnnnnnnnnnnnnnnnnnnnnnnnnnnnnnnnnnnnnnnnnnnnnnnnnnnnnnnnnnnnnnnnnnnnnnnnnnnnnnnnnnnnnnnnnnnnnnnnnnnnnnnnnnnnnnnnnnnnnnnnnnnnnnnnnnnnnnnnnnnnnnnnnnnnnnnnnnnnnnnnnnnnnnnnnnnnnnnnnnnnnnnnnnnnnnnnnnnnnnnnnnnnnnnnnnnnnnnnnnnnnnnnnnnnnnnnnnnnnnnnnnnnnnnnnnnnnnnnnnnnnnnnnnnnnnnnnnnnnnnnnnnnnnnnnnnnnnnnnnnnnnnnnnnnnnnnnnnnnnnnnnnnnnnnnnnnnnnnnnnnnnnnnnnnnnnnnnatatatattctaattttgaatgaataaatatatacattaaaaatattattgatccaatcctaaatataagactcttttataactaattcacatttttaaaaaattaattaatttagttataaacattatatttattaataatttgtattattttcaaaaaattaccattaaaacttttagatatcatcattttaatctttttacttaattattttctacttaattaatatgtgctagctagttatctgaatatctagtcctcgtaattaagagagaaaatcaatttactatgttattagtttataatatttattataaattaaagtatttaagatattttggtaaaaaaaattaatgcaagagataaattaaaaaaattaacaaattcaaaaaagaattttatatttagaaatgagggtagtgaaaacattacaaatttatttttattttccaaaagattttttttttctatttacttggttgaataaaaaatataaaatgtaactcaaaaaacaatcttgatatcttttagaatataatgcaatgtagcggtacacaaggagagtgctgctgcttcgtcataaaatgaagagagcaaaggaagaagagaaagaaatggaatgaacaacaaaatggacatgcatgcaaagttagcactcacattatttattccgtgggaacgagtggaatcgatcggcaaatgtttccctccatgctccactcttttggcttaggtttgctttgtccaattcattgtttccttgtgtcaaaatcacaattgtatttcataatgtgtgctttgaatattattcggttaaaagtatagatagaaggtagcacaaatcaggtggcacctcttatatgtttgtaattgtattgattacaattaattagtaaaagatacaaattataagatgaaaacatcctgagttttaaaatcaatactatctggattaattagcactactacaagaaaggcttttaaggtcggttatttgacccattcaaagtcggttctggaaccgaccttgtatggcaacgtcgtcaaaaaggctagcctacgacgtcggttctttgaggaccgactttgaaattttttttttttaattttttttttaaaaaaaattcgtacaatctaagtcggttatttaaaaaaaccgactttaaatgttagatacaaagtcagttattttaaaaaaccgactttgtattcgacatttaaagtcggttttttaaaataaccgacttagattgtataaattcaaataaaaaaaaataaaaaaacaaacatgtacatgcaggtatacaaagtcagttattttaaaaaaccgactttgtattcgacatttaaagtcggttttttaaaataaccgacttagattgtataaatttaaataaaaataaataaaaaaacaaacatgtacatgcgggtatacaaagtcagttattttaaaaaaccgactttgtattcgacatttaaagtcggttttttaaaataaccgacttagattgtataaattttaaataaaaataaataaaaaaacaaacatgtacatgcgggtatacaaagtcagttattttaaaaaaccgactttgtattcgacatttaaagtcggttttttaaaataaccgacttagattgtataaattttaaataaaaaaaaattaaaaaacaaacagtggtcagaagcatgattccattttattttaaataataatcacctaaatgtcatgatcttacttcatgcttattaacaaacaattcaaaacattcagtcaggcctggttttgatctgtgcccctttcataaaggactcatgatctcagggtggtttatgctgaatgtaggatttacacacgtctcttccaaaaagtgaccaacaagctacaatatgaaaagaatataattatagttccagcaggcacatcataagaagctcaaaacaagaaataaaattacattaacaaagtgcattaattagaattgtgcaaaattgaaactgaaattatgttctatatttaagttacaagtagaggtaaaatataaaacaggaaaaaataacagtagaccagaatagtacccaagcttcactacacctggagccacattatagaaattaatgttacaactcactaaatacaaatgttgggtaactggaaattacagtcatattactacaatgcctagctgttgttttacaaagtctagaatgtctgcagactacagttttatccgctcccaaccttcatatatatatatatatatatatatatttcattttcccacccataacacacaaaactaatgcttttatgtccaacaaacgaactcttatcctggtcttaaatcataccatgtacaacaaaaaaaggtgagagaaaataccactgaaaaacaaggccattatattttaaatacattctgacaaggaaaaggaacgtaaataatcttttagataaaagcaatatttaaaaacaaagtatataataattaaagaaaggagattactttatccaacaaacgagcaattgtctcagggggaggacatttgatctcatacttcaagcacgtgtccttcaaatattgattagcttcctcactcgacaagtctttgggaaaacttaggcctgccaccttctctgcaaatatttttatagttgcaaatatttaacattagtgtaaagcatttctgtgctgcttgaaccatggacacacaccgaaagaattcatatctctggtatgtgcctacatgcaataatttatcttataaagctcattcaccttacttcaaaaattaatttaatttaacttgcaagaaaagttggatacgttttaccttctcattcttttcctaataatttgccacttaacataataaccatagtcaaaaggtaaaacaaggaataagcttgactgagatttaccaaaatgaaattccataacatcaaaacactaaaatatcaaaccaaattcatccaacttggttggtcattgatattaaaaaacacagtaaattactccttagaacaaaactttgacaaactcatgctctagtgttaattaagaatatgttctggacaaaaaagctgaatagactacaccaattaatcgaagagactgaaacccatatcctgcatcacaaaacaaaatgaaggataaacaatcagaaaaacttcagattacccaaataaatttacgagcgtgaaatttgcaccaacagaaagctagttattacacaaagctacttcgtattgaaaggcaagatgttctttgatctatatgtccaaccaacaagaaattcagaaccattttaattacagaatatgcaactcaattagtatagactcaccaaacaacaagtttaaaaccattcatagtgtttttggatcagcgttcgtaaaattgattttgaagttatgtttggatgatttttaccttgaaagcaagtttaatgcaaaacttggcttaaatttttaaagtcaacgcaaaagctatgttttcacctgtagtctaatcgagaattggggcaaaatcaattttacctaatactaaccaagcatctatatttctactaaaattacattgaactggaagtaaaatcaattctgatgctgtccacagtcaaaccaaacacacacacacacaattagaaatgcaacaaattaactaaagcggcaggggtggaaagaaacacttacatcatcagattcctctttctcctccaccttttcctctttttttgcctcagcaactggagcagcagcagcaccacctcccccaggagctgcggcgacggcaacggcaccaccagaaggaaccgaggccaacttttccttaccggcagcaataagctcaactatatccttacccttaacttcagacaaaaacgattcaatcctatcttcatctgcctctactccaactgcaaatcaaaaacaaaattattacccatttctcaacctgatatctatgcaaatatgcaacaacaaaattattacccatttctcaacatgagggagacatcttgcttcatcattcacggcggcagcaccgcgcacgacgacggtgcagacgagatctgcactggaaagaacagtgtgagatggagaaggcataccgcaaccacggtggatggaggggagaccactgcgcacaatgacgatgcatacgagatctggcacaaagtcgaggtttttatgggtgtggtcggagtggaggtgggtgagggtttggaggaagtgaggctgagagagaggttttcgactttggactcagggaaagcaaaggaaacgaatttaggttacagcnnnnnnnnnnacacacacacacaattagaaatgcaacaaattaactaaagcggcaggggtggaaagaaacacttacatcatcagattcctctttctcctccaccttttcctctttttttgcctcagcaactggagcagcagcagcaccacctcccccaggagctgcggcgacggcaacggcaccaccagaaggaaccgaggccaacttttccttaccggcagcaataagctcaactatatccttacccttaacttcagacaaaaacgattcaatcctatcttcatctgcctctactccaactgcaaatcaaaaacaaaattattacccatttctcaacctgatatctatgcaaatatgcaacaacaaaattattacccatttctcaacatgagggagacatcttgcttcatcattcacggcggcagcaccgcgcacgacgacggtgcagacgagatctgcactggaaagaacagtgtgagatggagaaggcataccgcaaccacggtggatggaggggagaccactgcgcacaatgacgatgcatacgagatctggcacaaagtcgaggtttttatgggtgtggtcggagtggaggtgggtgagggtttggaggaagtgaggctgagagagaggttttcgactttggacacagggaaagcaaaggaaacgaatttaggttacagcgggtcgcggccggtcatagaaagaagggaaaaaatttaaaatagttttttaataatttaaaaagcatcaaagtcggttcttataaaaaccgactttgaataatagtaaacaacgacgggtcataataggaccgacttcgtttttgtagtattgttaaagtatttacaaaaatgccaccggttcatttacgaagtcggttatttaacaaccgacgtggattgtgcgtcgtggtttaaacattttgtagtagtgtagtgtcgcttcaaatcaaacttctgaatgtcatattactatccaagatctaattacctgttttttctaattgtatgtgcttgtttgctcttccattttctccgtatagactacgaatgttacagtagaacatgagtagcaatatagagaaaaataaatgcaaactaactaaatgattggataaaacaaaacaagagatatcaaatttaaggtgttgtgattgtttgaggaagatattcgcacacgagatcgcaaccagtattagaaaaaccatcttcaaattggacgattcaactactggatcgatttgcatgtttgaatgtctgatcagtaggctactggatcgatttgcaattggtcaatagactatcttttagtttctttctattcaaactctttttagcttagcaaaacttgaaactaattcttttaaactaattttggtttagtttggttcacaggaacatttggtgcaatctctctgagttcagttcgattcaaagctcaaagcccaagtataaaagtaaattgtatgcacttgtgtaaattttccatgcctttctttaatttgctgacataaggggattagagcttatcattagcaaaaatgggttcaccacaagaaatatgatatatgcttatagagatttttgcctatagacataaattattgtaggtaaaagtcaaaaaaattatatctatgaatacttttgcctatagacatattttatggtaagtaaagctaaaacatatttttatctataaatatttagggtaagtaaaatcttgtattaatataataaatatataaaattaaaaaatacctctacttacaaacacttaatgtaggtaaaatttcaaaaatcttgtgcctacaattgttcgatgtaggtaaaattctaaaatgtttcggcctaaaaacatttagtttaagtgaaattttaaacaactgcatgatgtagctaaaactcattaagatttctacctacaaatatttagcttaggtaaaaactttattttaaatttactataaatttaaaatatattttatacatttaaaaatatctatttagtatgaattataattatataaaaaagtatttttagaaaatttatttcaaaaagataaaaagatagaaaaataataacatcataatgtatttcaaaaaataataaaaaatttaaatgaatgtattaatgataaaaagtgaaaaaaatataaaaattagaaattaaaaactaaaaattacttgaaacaacaatttaacaagaacttacttagaaattatttattaaaaagtcaaataaattagtaaaaaaataaaaatttgttaaaatgtcttgtaaaaaacaatatatatcaactaataaattcctttaaaaactatactcctcaaaacccttcttcattgctgcaacttcacgcgccagatctgcaaccattaagttatgctccagcaccactacgcatcgcttattctcagcaccaacggacaggcgccggcggcgaagccgccaccgcagaggacggcaaggcacgagaaagtttatgtcacggcactcgcatatgaagtatgaactcaaagattcacctggtttaggtattgaatttttggagtttcgattctgaataattgaatggtccattgatttgattcaattatggttggaattgaaaatatgatttcaattttcacgtgtgttacttgactgtgtagttcctattggcatgtacggaattcagcactactttttcatattaggttcgttggttctgatttcgcttgtgattgtttctgccatgggaggcactcatgtgtgttgttttcgtgtggcttagttgttgtttttcgtgttgtgttgtgattgaaaatttggaacaaagacagctgataatatattttttttatcaaattgaagaaattcaagcatttaatgagggagctccagggggctatagttattggctcagctttccaaactttacttgggtatactggacttacttggctatagttattgtttgcacctttcaatttagattcctaagcaaatcacaccttaaaagtttaaaattatataatcagcttacgaaacttttgaaaaattcgttaaaatttcatagacttaatacgcgacttgcattcataccaaaagtcaagtggtagaaacatattccttgaaatccgttttgggtttcaaccagagccagattacccttcttggtgttgccaatgatattggtgagaatgttggcattcttccacgactagcctctgcaacaagttattattcgagaaaacaaaggcattatgcaggaccaggacttgttattcgagaataattgtagtatgagtatcaaacattttttatttattattattattattattattattattattattattattattattattattattattattattattattattattcctttattcatatttgttttcattgtattatttgattcatttagtaatggctattaatagtattgtttgttaagctgtacatggagttgaaagggcctagttaattatcacctctttctatctatggtgttgcagctagctatggtttgattttccacacttaaccaaaattgatatgatatgttaattttaaccgagcaaaataaaaagtctgtgcccctatcttacgtttccgaacttacataaatttggaatccaaattataatttgttgtttccataataattccaaaagtttggtaaatgatatgatatgagcaccttnnnnnnnnnnnnnnnnnnnnnnnnnnnnnnnnnnnnnnnnnnnnnnnnnnnnnnnnnnnnnnnnnnnnnnnnnnnnnnnnnnnnnnnnnnnnnnnnnnnnnnnnnnnnnnnnnnnnnnnnnnnnnnnnnnnnnnnnnnnnnnnnnnnnnnnnnnnnnnnnnnnnnnnnnnnnnnnnnnnnnnnnnnnnnnnnnnnnnnnnnnnnnnnnnnnnnnnnnnnnnnnnnnnnnnnnnnnnnnnnnnnnnnnnnnnnnnnnnnnnnnnnnnnnnnnnnnnnnnnnnnnnnnnnnnnnnnnnnnnnnnnnnnnnnnnnnnnnnnnnnnnnnnnnnnnnnnnnnnnnnnnnnnnnnnnnnnnnnnnnnnnnnnnnnnnnnnnnnnnnnnnnnnnnnnnnnnnnnnnnnntatatttttaacacaaaaattaaagttaacttcattttatcattttctctaagtagccaataaaaataagttaatcactttcttatccgacctcacttggtatgttgcaggaagtctgaaaaatcacttttatttaaaatgtgtccaatatctttaaatttatttatttagttaaattatttaccttagtaaatgtttcaagttctcaattacttgaataaagacgtgtgaattattcctctatactcactccagggacttcaccttctgggcaatttgcccgtgcttgctgtttgaattgccaatatggtaagcaaaggaattgcagtgtacaatcacaagggccataagatgtggcaacgtccagaaaataacactattgcctcagtatcatgttgcctgctcagaatctggctaagccttataaaagcttcagagtccgtcaatctcacaagtttttatgattggcagccagatggcaatactatgacaaaactccaagacctgaagcattctttcggaacggaatcacagctctactttgatgaaccgggacacatgtacataaaaattgatttttatcgtccgaggaattgaagtttagctaaataagagaaattgaatcacataattaagacgagcaagagattatcttagggtggaatcaagggaatttcaacacctaaccatttttattaattgatttttctagtacattattcaattgtgctcttgtttctttcaattaaatataataaaaagtccaaaattcctaattgtttatctcttaaatcaaaagagtaatcgttaatttgattgatgtattgttgataaaccaatttttttattgatacaataatttctccttattttatcaattgtacaactagtacttgtcgtaattctcaacaaactacaacaatatgctggtagaaggtgactcagttgatctttaagtcactttacgtgaagtccacatttcccacagtaggattagtgttagaaaacgttacagttcagagtaaagctttcaatttaatttccatagaactaaacgtgatggaaataaagttagtagaaccgtagaaatatagatgacagaatttgtttgatgttaattaatgtaaatgtactttctattgatattcaataaatttgcatgttgtcatcgttaaaaaataaaaagataaactattttctaaatttatctttttagtttttgaatttttatttattttttaatcacttaattttttagtatgtattacatttttgtttgcttggaactataataacatatccgtagagagagtctcacaattgatttttaaggcagcatgacacttcacgacaggttcattccattgctcaaagttggattagtgctaaagttaagagggaaagccttaggcttctactgaactgaacgccaagaaaaaataataaaatgaaaaggatgtattatttagatgaatagaaataaaaaggaaaaaaatgtaaatttttatggtcattgcaaaaatgttcatcaaataaaaaatcaaatttaatttgaaaaacctgaactttttatttaattatttctcaacataaaaatatatgttttgttataaaacaataatttgattttttaaaatttaaacataagtaaaagaacactgctaatcatttctccctccatttcacgtgtgttagtgagaaatatgatttggttaggactcattaattacaatttcatttctcattttctatcacattcaatcaagactatttttttatcacttttttctcttcattttaattttatatttattataattttgttgtatatagtaattcttttcaaatcgagtgggattaagtctcagtgaaagatgaatgcgtaataaaaaaagcttttttttgtgtcatgatttgctccctgcaccaaccacatggaaggaaggggaaaagctttgaggtgggttatgcagtatagtctcaaattaaggcgggaacaataagaaaggtaatatttcatgagatagaaaatgtagaataatctcaaatttaaacacaagcttcattgttccacaaacaaataataatacagtgccttaaagttatgccaatgtctgtaattctgtaatgagttagtcctgtttggacaaacgataaaatctagaccacaagtgtttgtcgaaaaagttaaattgaaagagaagaaacagaagtattgggaaaacccccattgaagccactgcataagaaacccacttggaagtgtgatcaaatatcaaaaagaaggctgcagtgaaatccacaaccatagcagcaacagagataataagtaaccaacgcccaaaagtcaagctgggatgtagtgatatcacaaattcgctttgtgcgaatcttgatgaagtgaaatttgacaaaaatgtgagtaaagacgcagaagaagtgaataatgcgactgcatttgtcaatatgaagacagtaaaccaggcattggtcttatcacctggaacagtcagagcagccgcaaatgctacggtagcaacaagtgttgacacaagcatgcctgattcggctattcctttggctgcatccttaatttcttcggataacttcttgtgttcatcacaaaatacatcaattggtgtcttgctcatgttgtttctcattgttcttagttcatcaggagcataaatctccacgaactatttacaaatcaagagtatatgtcaatgatggtatccaaatgcataacttaattaatcttttaattatcacctaataactagagcaaattacaacgccactttatgaagtttagtaaggtttgagggaatgttaatgtaatgttttcaatatgagatgttagtgtaatttttcaaatttaaaagaagttagtgtaaacttaaaagacgttagtgtaggaaaataaaaaaataaaattatatacaattacacgaaacctcaatgaattattgtaatttgctttaataactattacatattaaattttaagaaatacaatttcaaagttaagatatatattttaaaaataaatcttgcgggtgatatttgttgttacaaatgcacttctataatttttaattaaaattttctttcgatctatatattgcctgtttaactattatgcatgctaaagacaatggataacaaattttaaaaaattgtcacaataatcaacaaatactacatacaatgatttctatttttaattaaaacttgttacttttaaggatttaaaatcagtctagttaacaaaagcctaaaatgtgtggaatttttaaatttttaaaaaaagattgctagaactgatggatcccatgcgagtgaataaagaatggttgaataagaaaaactaagcaaattaattgaccttgaaccatgcgagatctctttgcattttgaatgcctgctcttaaactggaaaattcttcgaattcatgaactggtggaagatgcgcagccaagtgtagaatgttgttacctttactgtccacttctcgttctatagactcttttaatgtccatggtatcgtataaaatattcttttttttttttgaaatagcacaaccaagtgcagtaggttccgtccattttcggggtcctttattctcactaattcaggctgaatttcaataatcaacagcacagccacattatttcctgattttattgcatcaaacagcactgacgaaggattagttatctcgtctatcatccgcttatgttccaattggttaacttgagtccataattttttaaatagccgaccaccttctgatctctcgtcctccatgtctagtaagaggtatatacaatgttatcaaaaccggttcggtcattgacccagtcgagatagtgggtcagtgggtcagtggttcaaccggtgggtcagtaattggcccggtttggcccggtctacattaaaaattttaaaattatattatatataaatatataactaatattatttgattaaaaaaataatataataaaaatttaaaataacaattgaagtattaaaattgataacacaagtaaattgtattaataatgtaaataaaaattatttaaatttaaacactaactccattttctaataaaaaaacaaggagaaggagttcattaagcaaaaatgggagtgcaggaagcaaatcttttgtggatgggcccaataaataaaccctaatcagcatgtatatataagtaacttatttcctctcttccgctggccttcactgttgcgcctcttcccattcagttccactgttgcgccgcttccctcttcagtgtcatgctattcttcttcagcaaatggcgtcgtgaccgtcgtctcttatgggcggacgacgaggttgacgaccgtgcaggggcagcatgagcacacggcggtgcagacgacggcgtgaaggaggaccgatatgcagaaattgaaggcagagcttgatgacggtaacatctatgatgacgacggcaacggcggcggcaacgccgcagtctaagtataaagccagaaggaggaagtgccgggttcctaaacccgtccgggtagccgggttcttcaaaaatcggctggttcttgccgggcttaaccgagccacttgcatggccggtccgacacccaactcggcctggagctaccagcggttcccggtctaaccggtccgaccggccggtccgagccggttttaataacattgggtatatatatagttgattggtccaaccaatgtttaacatgaaatgaaacaaacaaaacttaaatttaaattttattcttatatataagaagcaccattttttatctctatttaaaaaattatatattttaatccgtacatgaaaaaaaaaatgtaagatatttttgcacatgtggctcatgtgttgccaaacattaatttgtgttattagaataactcaacaaacatctaataccattattacactggatatagatatttaaggactaattcttaatttttttatataaaacaaatatatataactttctaaaataagaatcaaaatggaaattaatgatgtcaaataagacctaaattttagcttagcacacacacacaaaaataaaaagccattttcaacatgtgaaagcttacctaaattttttggagactttcgcgccagcatatgcaatgctgtaaggttctcttcatttcttgcaatggccagagtagttagatgttttttcaaataatcgcattgccgaatctgttatatgaacaaattaagcaaaactccaactaaattgaaaaaccacgtacttagttcatatatatctccttttatatatctgttatatgcacaaattaagtaaaactccaaccaaatctgtctcgacgtattgctagatgaagagttgtgtctccacttgagtttggtattagcatgtcttctggcctcatatgcttaactaactctttcacaattccatcccagggtttgtttactgctagatgaagagctgtgtctccacttgagtttggtattagcatgtcttctggccttgatatacgtctagcataagcgtttttccaagcataattagatcataaaatgcatgagaatgaatgataaaagcttataaattgcataaatgttgactaaagtgctttgataatgttttaatcaattttgagtagccaacaggtgaaaagagccaaaggaattccagaggaagcagagtcaaaaccttcgcgcgatccgcgccgttcacggcgctagtagcgccacattcttcaagtgacacgatccgcgtcagatcccgcgccatccgccgcgcgtctagcgccatagtttcatcagtagcgcggccagtgccaagtgcagcgcgatccgcgccaatgctgccctggaagttgaatttcctctggaagttggcgccaaccgcgtggtgtgtggcgccatccgcgccatagttgaagtgggaaatgcagttccactccacgcgacccgcgccgtacccacgctatccgcattgcttcagcgctgacagcgccaactctcgcgcgatccgcgccacacttaaaatccgcagttcttctgtgctgtcaagggtaaacttgggatttctcttcccgaagtataaatggaagaacccactgctgaagaaaggacttttgggcgaaaaatcaaaaaaggaaaggaaagaaagaaagcttggaagcttagctagggtttggggattgtgaggtcaagtgggttcttctccttcttctcctccttctccttgcttgtgtatcagctggacatgcttctttttgctgtaccaaggccaaccatgaataggtttggctagttctattttgtagctagggccaagcacttgatgtaaatcccgtttgagttgtattgaatgctcttattcattaatctaaagctattttattgcactttgcttgaatgttcatatctcttcttagacttgatcaatctattaaggtttttagagctagggttcacaataggaatgttggggctttagtcttggaactaagtgtgatagcttgctttacattacctaggaatgagaatgtatgtgggtagtttattcattatgttgcttaatgcttaaccctaggaaggtgactaagggattagaactttcaagtgggttaaagggttgtttaactgaggaattggtaaacaactgaacttagatgcacatacttgctaaatagcttaactaatcgaatataagtacgcaatacggaccatttgggaggaacatcgagtgtgggtgcattggctacgcttcgtttatactgtgaaaacttaatttcttgttcataacttagtttatgttttcaaatatcattttactttacttgttcaaacaaacaatcaatacttttaccaaaaatttgttcatccaacttttagatttaagttataatcgaatcagtgcactaatcctcgtgggaacgatatcttacttatcattttattatttgaacgaacggtatacttgccgaattcgcaacaggcctcatacgcttaaccaactctttcacaatttcaaggttgttgtaacgtactgctagatgaagagctgtgtctccacttgagtttggtattagcatgtcttctggcctcatacggttaaccaactcattcacaatttcaatcatgtcttcccgtgctgctagatgaagagctgtgtttccactatcatttaacggaatgcgtaccatatcaggacatttatcaataatcgattttgattccagccacttcgccagatatatttgataccccagatcttcttttaaagaacctgcaatcctttcaaacttcacattataacatgtcctttatatattaatcataacttttactatttagttgcaaagaagaccattttaatttctcgtttaccctaaatctgtaaaaattctcttggaaacttgtcttaaattttgaattcttaataatttcatcatttgtaatttgaaatctaccgatccaatcatcaatcacctttaattaagtttgaaaattaattctatgatgataagtaaaattgtttttgagagaagtaatttatttttttattttcttcagttgacaaaagctaattgatcttaacatgtgacttatttatactcactttaaaagtgattctactttttttatctttcgaataaaaaaaataattttctaaacccattgttgaaatatcattcgtataataatagtataaatatatttttattaacgtcaagtggtttcaaattcaatttttttgaaaatgtaaaataaacaaactcttaagacatgatctctgaaatgcaccctcttgtgaatgcaatagtttcaagtataacttactcagctcttctggagtcatttcattcactcctctactttcatgttttggtgccggcgagtttgttgaagtggcaattggagtttgctcatgactttgattaatttgaattatgtggtcatctgaaacttcgatattggagttcatgatttaattctagggaaaatgaagtgatttggagacctctctgaaactccctgttctataagtgttgcttctttctttccagcgtgcgaagcttgaacatattatatatggtggtaaaacaagagcccttaattagttttccaacttacacttaaaataattatttcctatatgacattttgtggattacagcaatgttcaatctgttcaacacctcaaccctacagttttcaaaagctttttaagttgaatgatttctaaatttataaaattaattcttttttaaagtaaataaatatattcattaaatttgttaacacaaaaaaatatatccattataaaaaaattatattcattaaattgtggggattagcgagactcagctatcatgacactgttaattaacttactctcaatttaatattatctttcttcgttgtacgattgatatgctgctagcacatcttagtttttagggtaaattaattagtaattcatataataattagaaatataggttagaattagttaagttatttatttatttgctattatctcattttattgttattttgttattttagagttaaaaagaggagaaaagaagaaaagaatcagaaccaagaaatatttgtcacaaaaataaaacaacaaaagggtttagttaccctaattaactatatggacatggaattataaatagggacttaggaggccaagagaagaacacacagaaatacaaacagaaacacagtgaagagaagatcaagaccagagattgaagaggattaatgcttctgctctctttgtattctttgaggttagacatgaacatgtctggctaattttctttattgtggttagggccaaaacccaatgtgaactcctctgtaatttgattggtattaatttgagattattatgattgctttgttttactctgttcttcattgttatattctttcttagaattggccattctatttaagttctgagggttaggattcgcaatagggatgttgggattctaatttctgacatgagtaaaataacaatttttacattgcttagggatagggatgtatgattgcagaactttatgatatattcttttaaatgcttagcttgataggaatcgctaaggaattaggatttttgattgggttaaagggttaaattgctaaggaattaagatttgactaaattcgaaaagatacatcctctgagtaatcaaaaataattaattttaataaccaattcaagtgaaagaggtagggatcaaaggggattatgttctaaccacaatgatttctcttaactgcgtctcaatccattttaaattgcctttaatttcttattaatttctgtcatttatttaatttactcaatttcacaaacaatattaattttccaatctattgttttcttccaatctcttagaacataagttacgataaaattagaaattcaatccctgtggatacgatactctacttactcactttattacttaaaacgaacggtacacttgccgtttcgcaacaacgatgatatgatagcgtttgttgtatatatattatatatttatctaactttggttgacacattgaattctatgattatttatccaacacatttttataaagttgaggaagacgcaggctaggatgggagcgtgtaattactctcaatttaatattatcatggtcactagtttactattatcgtcaagaatccaactaagagcctcatcatttcgatatatatttgattggtccaacaaatgtataacatgagcataaagaaacaagttaaattaaagtttggtcttatatgaaacatcatttttttgacacacataattaaataaataaataaaacacaattcgcaaccgatcatgaatgctttcttagaatttctgaaggctttcgcgccagcatatgcaatgctgttaacatctcttttgccccttcatctcttgcaatgtccaaatcagttggatacttttcaaataatttcattgccacatctgttacatgcacaaattaaatagcgatggtggattgcatatgtacaaggcaaggtaaaactccaactacattgaaaaaccacgtacgagttcaactagataaaaaaaaaggatgtttggttttacactgaccaaacatgttgctgctaatggtcataaaaaacagtcgttgaatatccttataaaccattttttgaagcagattctgagaggacaaaatttgcaccattttgttgtggccatataaaacagccaattcaagcgaactggaagcatcccatctgagtttggtatcagcctagaacaattagatctgcaattctcatgataatgtgctcagtctcattaagtttccctcttttgccttctatttttcacatgcacaaacatgattagacgtgtaaatgatatctacagaagaaaattaaatgttgggatggtcttgcttttggaacatgagttgtttgttctagtgtttaccttcactttctagtttctaaaatgtctgagttactttgcagaaaacagtgagtgcagacttttaatgtctttgattttctaaaagatattgtcagcagggtttctgatttaggtggttctgttgcaactcgtgatgaccatactgtcactaagaggtttgtgctctgattaatactcatgttacttggaacatgttttcagtgtggtgaattttgtttattttatattaggaaagatgatgataatgacagccacgaggagcccaagagaaataacaaggtaatatatcaattacttctcagtagttagcttaaatttttcctgtgtgattaaaccttttgctgagtaattatctcttgtctatgcagactgtgaaccttttgctggttacaaaagaagttgcttcactgacttgcgaatacaagtacatttagtatagtctgtaaacgttactatacaaagaaccaaaactatctggtttccttaaaacttttggtgaaaactgttgttgtaattgagcaaactattcactatagaatcagcactagcacataatgtggaaattctagctcagagatgcaacattcgaaagaacctcgcagcagcttgatgttaaatattatctgaataatgaaatgtttttatttttcatgatttgcacagagcctggacattgcattggcagaggaagggggtatcaatgtcagaagagaagcatgaggaataccctgaatggtccttgtctgatatggaacaaatgaacattgatcccatgcaactagctaattaactttaatggaaggattgatgaagatgaagaggattatgatgaagaaatgtagatgaacctgttttggtttagaaagttctaattgagaattatagtagaatttttaggagtagtattagacaaatccttagtggttaggaagattaggagggataggacattgaaaactttagtccttacaacctttgtttaaggataaaagtggaaatatagattgtccaattagaaatagccatggtattgttatttgagaaattttaatgtcatataggtcttgcctatggtagctaggcactacattcagatccttaaacatagggattttgattttttttgggttgttagctttgattgtggcgttgtgcatgtaagtctgttattgtatcacatgtggaaggatgtcttatttagatgaattgaaataaaaaggaaaaaatgtaattttttatttgtttgaataaataagagagtagaaaacaaaaatatggtcgttgcaaaattttcatacaaataaaaaatcaaatttaatttgaaaaacctgaactttttatttcattatttctcaacataaaaatattttgttacaaaacaattatttgatttttaaaaatttaaacataagtaaaagaacactgctaaccatttctccctccgtttcacgtctcttagtgagaaatatggtttttgactcattaattataatttcatttctcattttctaacacattcaatcaagaatatttttttatcattttatttctcttcaagttaattttatatttattataattttgttgtatatagtaattcttttcaaatggagtaagattatgtctcagtgaaagatgaatgtgtaataaaaaaaaaaatctgtgttatgatttgctcccttcaccaacacatggaatgatggaaggaaggggaaaagctttgacgtgggttatacagtatagtctcaaattaaggcggaaacaataagaaagtaatatttcatgacatagaaaatgtagaataatctcaaatttaaacacaagcttaaatattattcaacacatgattaagaatactttgccttaaacaatgtctgtaatttgtccagtttggacaaacgataaaatctcgaccacaaatgtttgtcgaaaaagttaaagtgaaagagaacaaacagaagtattgggaaaacccccattgaagccactgcataagaaacccacttggaagtgtgttcaaatatcaaaaaggaggctgcagtgaaagccacaaccatagcagcaacggagataataagtaaccaacgcccaaaagtcaagctgggatgtagtgatatcacaaattcgctttgtgcgaatcttgatgaagtgaaatttgataagaatgagagtaaagacgcagaagaagtgaataatgcgactgcatttgtcaatatgaagacagtaaaccacacgttggtcttatcacctggaacagtcagagcagccgcaaatgctacggtagcaacaagtgctgacacaagcatgccagattcggctattcctttggctgtttccttaatttcttcagataacatcttgtgttccttataaaatacatcaaatggtgtcttgcccatgttgtttctcattgctcttagttcacgaggaacacacgcctccacggactgtttacaaatcaagtgtatatgtaaatgatggtatccaaatgcataacttaattaatctttcaattgtcacttaataacgtacagcaaattacaacaacactttatgaggtttagtaagggttgagggaatgttaatgtaatgttttcaatataacagatgttagtgtaatttttcaaacttaaaagaagttagtgtaggaaaataaaaaaataaaattatatataattacacgaaacctcaatgaattattgtaatttgctttaataactattacatattaaagttgtaagaaatacaattttaaagttaagatattttaaaaataaatcttgcgggtgatatttgttgttacaaatgcacttctataatttttaattaaaattttctatcgatctatatattgcctgtttaactattatgcatgctaaagacaatggataacaaattttaaaaaattgttacaataatcaacaaatactacatacaatgatttctatttttaattaaaacttgttactttcaaggatttaaaatcagtctagttaacaaaagcctaaaatgtgtggaatttttaaatttttaaaaaaagattgctagaactgatggatcccatgccagtgaataaagaatggttgaataagaaaaactaagcaaattaattgaccttgaaccatgcgagatctctttccattttaatccttgctcttaaactggaaaattcttcgaattcaactggtggaagatgcgcagccaagtgtagaatgttgttaccttcattgtccacttctcgttccatatgctcttttaatgtcaatggtatactataaaatattcttatttgttgaaatagcgcaaccaagtgcagtacgttccgtccattttcggggtcctttattctcactaattcaggctgcagagtgctaataataaacctcaaatgcacatcatttcctgattttattgcatcaaacagcactgacgaaggattagttatctcgtctatcatccgcttatgttccaattggttaacttgagtccataatttttcaaatagccaaccagcttctgatttcttgtcgtccttcctgtctagcacgtggcctatatatagttgattggtccaaccaatgtttaacatgaaatgaaacaaacaaaagttaaatttaaattttattcttatatataagaagcaccattttttatctctatttaaaaaattatatattttaatccggaaaaaaaaaattgtaagatatttttgcacatgtggctcatttgttgccaaacattaatttgtgttcttagaataactcaacaaacatctaataccattattacactggacatagatatttaaggactaattcttaatttttttatataaaacaaatatatataactttctaaaataagaatcaaaatggaaattaatgatgtcaaataagacctaaattttagcttagcacacacacacaaaaataaaaagccattttcaacatgtgaaagcttacctaaattttttggagactttcgcgccagcatatgcaatgcggtaaggttctcttcatttcttgcaatggccagagtagttggatgttttccaaataatcgcattgccaaatctgttatatgcacaaattaagtaaaactccaactaaattgaaaaaccacgtacttagttcatatatatctccttatatatatatatatatatatatatatatatattacggtatctaatgggttcagtgggttcaattcagtttgtaaaacatcataatatgtaaaagagaactacattaaaataaggagaaataaggttgtttaattcgttttacacttactaaacatgttggttctaatggtcatgaaaaacagtcgttcaatatccttggaatccattttgtaaaaaaaattcagagaggacaaaaagtccactatcctgttgtaaccatatgaagcagcaaagtgaagtggaagcatcccatctgagtttggtattagcatgtcatctgacctcatatatataaccaactctctcacaatttcaaacctgccataacgtactgctacatgaagagctgtgtctccacttgagtttggtattgccatgtcttctggcctcatacagttacgcaactcattcacaatttcaaggctgccttcccttgctgctacatgaagagctgtgtctccacttgagtttcgtattaccatgtcttctggcctcatatgcttaaccaactcatctacaatttcaaatttgctgtgaaataatgctagatgaagagctgtgtttccatatgagtttcgtattggcatgtcttctggcctcatacggttaaccaactttctcacaaattcaactctgtctcgacttactgctagatgaagagctgtgtctccacttgagttttgtattagcatgtcttctgggctcatacacttaaccaactcattcacaattccacccttgccttcccttactgctagatgaagagctgtgtctccactatcatataacggaatgcgtaccatatccggacatttatcaataatcgattttaattcgaaccactcattcctccatatacgtctccacagatcgaattttaaagaacctgcaatcctttcaaacttcacattataacatgtcctttatataataatcataacttttagtatttagttgcaaagaagacccttttaatttctcgtttaccctaattctgtaaaaattctcttggaaacttgtctcaaattttgaattcctaattatttcatcatttgtaaattgaaatctacctgagaaatttgagattatgtattagtcgaagggatccaatcatcaatcacctttaattaagtttgaaaattaattctatgatgataagtaaaattgtttttgagagaagtaatttattttttattttcttcagttgacaaaagctaattgatcttaacatgtgacttatttatactcactttaaaagtgattctacttttttatctttcgaataaaaaaaataattttctaaacccattgttgaaatatcattcgtataataatagtataaatatgtttttttttaacgtcaagtggtttcaaattcaatttttttgaaaatgtaaaataaacaaactcttaagacatgatctctgaaatgcaccctcttgtgaaggcaatagtttaaagtataacttactcagctcttctggagtcatttgattcactcctctactttcatgttttggtgccggcgagtttgttgaagtggcaattggagtttgctcatgactttgattaatctgaattgtgtggttatctgaaacttcgctattgtagttcatgatttaattttagggaaaatgaagtgatttggagacttctctgaaattccctgttctataagtgttgcttctttctttccagcctgcgaagcttgaacatattatatatggtggtaaaacaatagcccttaattagttttccaacttacacttaaaataattatttcctatatgacattttgtggattacagcaatgttcaatctgttcaacacctcaaccctacagttttcaaaagctttttaagttgaatgatttctaaatttataatattaattcttttttaaaataaataaatatattcattaaatttgttaacagaaaaaaatatatccattataaaaaaattatattcattaaattgtggggattagcgagactcagctatcatgacactgttaattaacttactctcaatttaatattatatttcttcgttgtacaatgatatgatagcggttgttgtatatttattatatatttatctaactttggttgacacatttaattctatgattatttatccaacacatttttataaagtttaggaagacccgggctaggatgggagcgtgtaattactctcaatttaatgttacctgtcttcgttgtacaatgatatgatagcggtggttatatatttattatatatttatctaacttccgttgacgcatttatactagttatagtcaactactccgataaccattgaattcaaagcaagactagatgcattttattatcgaaaaatgtatgaattttattaaactcactacaataaccagaaatcaatgaccgtaaatttaggaagacgcaagctataatgggagagtgtaatgggtcttttacagtcagaaagtattttatcaccatcagattatcttatttaaaaatcaatgaccataaatttttcttcttttattattatttttcctttttttgtcctcctctttcccgtactaccatcttcctctttcttcgtctcgtctcttcttcccattcttcctccttcgtctaagcggcaacggtggtgccatgacggtcgatgatagtagggatgttgattcgtcgttgcctgaccgttgtgcggagtaaactagagagaactcgagagggtcttttgtcgtttttcttgcagtgttctgccacaagatttcaaacaagagaaaaagcatggaagacgaaacagtcacaaagcttgatataattattgcctcacttaaacccaaattggattcatttgaacaaacccaaattttagtctcccaaagttttgagctttttgatattttttgtgtacgtgttgattttttctcatgggtgccaagttacgagtttgtttcttgcataaacgttgtttgtataccatttttactctcaattttgagtccaatttggaagaataaaagacctaagattttggttttgaaaatcatgacattttttatgacgatttgtgattatatttgaaattgcagtttcaagaaaattattgtaccgttgatatgtaatatttgtaacctggccttgttttctatgtggctccaccactgtagtgaccatctgtggatgtggaatagggaaaaaggaggaaagggaggggttgccgaaaattgctttctgcgtaggtgtcgttgtcggatacaagaaaaatggaagaaaaggaataaatcagcaatggtgatgaataagccagagcgataaattggatggtgcattcctgtgtgaagaaattttatagccgaatttctattgacacagttacaacatatgagtagtgatatgtcttattaaattggatgatgcattcctgtgtttatcactttattcgatctaaattcctctgtggatattaattaaaaaataggtccttgactgtttgggcaagtcctcgcgagggaaccttatttgttgaaccatgtattacatttttgtttgcttggaactataataacatatccgtagagagagtctcacaccctcaaatacactctttttatcccactctctttcattgttccatctcatcttattttttaacctcgtccttattgatcctcactcaacctctttgccaatgaataaaataaaggggcaagttacttgataggcatagggatagacgatttttggttctttaaaatataaataataaaacaaaataaaaacttataaagtgtcataacctgaataataaccggtaaacaagtaactattttaaaaaataaaatgagatgaaccgatgaaagatactggtgaagaaaagagtgtgtttgagaatgtgactctaatattcttccttattttattgtagatgtattttcacttttttttcatcttgtccttaaaaactaaacaaaggaacatttttttgcatcacttagtgcatcaattggaaacatttagctatttacgcgtaaatacagaataatcaatacgtaatattattagtactcgttcatattgaaataggatgccaaatttgtactgccctacgcccctacaccgtctgtacgtaccattatatatagtagctgcatttattccatacaataaatacatataacatatttaatactaccttcgagtttttttattctcttacattacccttcgaaggaataatgcaatacatacatatacatatatatactttaactttcaccttgcaaccatttataatcttctgtaacctgaaaaaaaaaatatttttttttcggtccatatatttttttttaataaaacttgattttagttctcaaattttagttttaattaatttaattctcgaattttataaaaagacaataatttgttcctcctcagaataaaagtaatgatgaaaccagtattatttttctaaggtttaaagattaatttgatcaaaatagaaatatggaaactaatactatacaaataaatatttatcgagaggacagagattaaaagtatgccttattatggctagaccgacaccgaaagaggattaacactgatgggcttgaattcgaggacctccttggagttcaaccatgacctaacccacactttcgtttcatacacatttttggtttcaccatgttttgcttcctaagtgatgtagtatatgaacacttccaccacctgctgctttgcactaatcaccctcacaaactccagatttgcattctgcatttccaactccaatataatcaccacaagtataaaaatagagataaattaaattaaacatgcatatattaagatgttaattaattcttaagttgtaaagttgaaacttaaaggaagaaaattaaagaaagaacctctttattgttgtattggtcaacagcaaaacgagcgagattctcgatctcgacgctgttggcagctccaggcacatcggttatgccacctgttactggctcttttgtttctgttgccatttctcttttctttatcttctctacatcactactattctacggctttttatagggaaatatcaatgcatgtttatcttatctcattctgattgaatttgagtggtaaacaaaaaaagatcaagagatcgaatgaaagatgaaagatttttattttatcttatgcaaatattgtttttgaggtaattatatgtcatgcattaaacgtggattcttattctaataagaatttgaactattattcgatccaatgttgtaaaagaatagtccattccattttacctaaatctaatatttttgaaaaatgttagtaatacattttaaatatgatttttttcctattgattgaaattcttttagatttcaaaattttgtaaatcttacgtcttatttaatgaatttatttatgattttggagcatttaataaattttaataataataataattaataattattattttgacatgaatatgttaaaaaactgttatgctagccttgatctccgctactgagtgtgtatatttaattactatttataacaattattcatgtacgttttttatgttttttattttaaaaaaaagcatttttttaactattgcatttgcatatgtgtgaccaatctcagatattccctttgtcattaatatttaacaaaaagcatttttttaactattgcatttgcatttttttaacaaaaatttcatattctccgtacgtcgttttgtcgtgggtgtttcaatgaattactgcagaagaataagcgggacacaactaattaacttcaaccttgacatttttggatactaattgtggacacaactcacccatgatttaagcacgtgtttggatgtgaagtgtgaactacgatattatgtctccattatgagttggttgtgaaactgtgaaagctggtacactatgtttggcagagatataatagatagaagaaacaagaaaatgaggatgatatggaataaaaaattaatgatggagtatatttgataaaagagaaataggtgaagagagaattaaaaagatatatatgaaattaacgatgactagaaatcgatagtaacttctccccctctctaatttgtatttctcttaaataaaatttatattttttacttagttttcacctatttttcttttctcaatttttatcaactgtatttctctttaaaatttatttgtttctttcgtaaagatccggatgtatcctatttttatttctcttaaattaaatgtttttatttttacttagttttcacctattttatttattatatttttcttctctccatttttatcatctgtatttctcatttcatgtatttgtttctttcgtaccaaacaatccgaatggaaaaaaaaaacaatcacgttgctgattcgtgaccatacacgttactatggatgtgaaaaagagatatattagatgcatgctctttacaaataatcatcaacataaaatagataatgtcaaaaagaggcatattagacattagtagcaccagaaaaaataaaaatgtgtcagactaatcatcaaccactagattcataaacaaggcttatagtaatgagttgatggatctatcataaaatgtatttagaatagctgtggaaaaatattaattgttttaataattgattatatgatattagttttgtaattcgatgtattatatggaaaatgattttgagataatttattttatttgaattttttannnnnnnnnnnnnnnnnnnnnnnnnnnnnnnnnnnnnnnnnnnnnnnnnnnnnnnnnnnnnnnnnnnnnnnnnnnnnnnnnnnnnnnnnnnnnnnnnnnnnnnnnnnnnnnnnnnnnnnnnnnnnnnnnnnnnnnnnnnnnnnnnnnnnnnnnnnnnnnnnnnnnnnnnnnnnnnnnnnnnnnnnnnnnnnnnnnnnnnnnnnnnnnnnnnnnnnnnnnnnnnnnnnnnnnnnnnnnnnnnnnnnnnnnnnnnnnnnnnnnnnnnnnnnnnnnnnnnnnnnnnnnnnnnnnnnnnnnnnnnnnnnnnnnnnnnnnnnnnnnnnnnnnnnnnnnnnnnnnnnnnnnnnnnnnnnnnnnnnnnnnnnnnnnnnnnnnnnnnnnnnnnnnnnnnnnnnnnnnnnnnnnnnnnnnnnnnnnnnnnnnnnnnnnnnnnnnnnnnnnnnnnnnnnnnnnnnnnnnnnnnnnnnnnnnnnnnnnnnnnnnnnnnnnnnnnnnnnnnnnnnnnnnnnnnnnnnnnnnnnnnnnnnnnnnnnnnnnnnnnnnnnnnnnnnnnnnnnnnnnnnnnnnnnnnnnnnnnnnnnnnnnnnnnnnnnnnnnnnnnnnnnnnnnnnnnnnnnnnnnnnnnnnnnnnnnnnnnnnnnnnnnnnnnnnnnnnnnnnnnnnnnnnnnnnnnnnnnnnnnnnnnnnnnnnnnnnnnnnnnnnnnnnnnnnnnnnnnnnnnnnnnnnnnnnnnnnnnnnnnnnnnnnnnnnnnnnnnnnnnnnnnnnnnnnnnnnnnnnnnnnnnnnnnnnnnnnnnnnnnnnnnnnnnnnnnnnnnnnnnnnnnnnnnnnnnnnnnnnnnnnnnnnnnnnnnnnnnnnnnnnnnnnnnnnnnnnnnnnnnnnnnnnnnnnnnnnnnnnnnnnnnnnnnnnnnnnnnnnnnnnnnnnnnnnnnnnnnnnnnnnnnnnnnnnnnnnnnnnnnnnnnnnnnnnnnnnnnnnnnnnnnnnnnnnnnnnnnnnnnnnnnnnnnnnnnnnnnnnnnnnnnnnnnnnnnnnnnnnnnnnnnnnnnnnnnnnnnnnnnnnnnnnnnnnnnnnnnnnnnnnnnnnnnnnnnnnnnnnnnnnnnnnnnnnnnnnnnnnnnnnnnnnnnnnnnnnnnnnnnnnnnnnnnnnnnnnnnnnnnnnnnnnnnnnnnnnnnnnnnnnnnnnnnnnnnnnnnnnnnnnnnnnnnnnnnnnnnnnnnnnnnnnnnnnnnnnnnnnnnnnnnnnnnnnnnnnnnnnnnnnnnnnnnnnnnnnnnnnnnnnnnnnnnnnnnnnnnnnnnnnnnnnnnnnnnnnnnnnnnnnnnnnatcaatctaaccttgttatatttttgtctcttttctatcttattttttttacataaaaatgtaaaaaattacaatataaaaaataaagtaaaataatcacatatttattatgttataattattattatttatatttaaattatatttatatattttatatttaaacataattaaatattttaaattttaaatttttgtcaattcttaattttatatttatcacattgatataaataatgaaattaccaaccgaaatagcttatcgctcgcaaattaatagtatttttagcggatggtaaagtcagtcgcaaaatagcacaggtgacattgtttttataagttttacaacgataacgaccgaaatttcagtcgccaattatgaaaaatcagcaactgattattttggttgcaaaatattataatcagattccttcactgccgaaatagacttcgataggtttgcagccaacataccgttgctaaatctcaatatttcttttaagcttgaaaatagaagcagtcactatttgtgaccgatgggttgtactaaaaaacattttgttgctaaattgagattttttttcttgtggtaggtcaagcttaggcttatgaaatcttagccaagctttaaaggtttaggaagtttattcaaatttataatcatagatgatagttatagacgaatttctttttaattttttcacaattcatttaaatttaaattttgtaaagtaaaattattttaaaatattatgacccaattaacttaatctaattcaactcattcatgatcgatcgagtttgtttcatagaaaatttttcaaacacaatctaatctagcttaaattttttgattggattgagtgacaaatttagtcaaatctaacccaacctaacttgtgtacacctctaatcagtgtactgttcaacgcataattcttaatataccaacatattagtttaagtttcaattgtctatataataatgcaatttgaaaattaatttattagttgtctaatttattttttaggtttgatttgattctctaaattttttgaaatacaatttgatcttgccttctaaattgagccaatgatattaaaaaataacacttgtgtgacatcttaaaaacacttaaggatgattttaaatgtcacaaaacacacatttaaatgatatgatcattcaaattaatttagacaatataaccaaattaaattgattttaaaaattaaataaccaaattgaacccaaaaataattagaggattaaattaaactaattttaaaaattaaaagatcaaattaaattcaaaaaattagagaaccaaataaaaagttaaaaataaagtagtgaaaaaaataattgaacctttttatttatttattgacaaatgataaacgcatttaattttaacaaataaaaattgataaatatttaggaccctgcccaaatccaaggagggcaagtacttcatgattgtgacctcataatcgcattgagtacagaagacaccgcaccaccagatcattctgctataaagtttgaatcatcaccatccacacattggacgaaacacgcataaattaatacataatcaattattttattaatttcgatggaaatatttatctgtagtaatttatgctgaaataggatggcaaacatgcacggcaaaaaaaatttatttattgtagtttaaataagaaattatcaaaatattgcagtttggaaactattttcaaatctattgcaatcagtcacgtgcaaccaagacgtgtttaaacacatcgtccctggacgtgtttaaacacgtccaaccatgacgcgattcaacaagcattcacgtccacacaggacgtaacccagcaccagtcacgtcgtccaaggacgtgaccctgctcccctatatatacccctcattcagcgtttgcgcccatttttagcatttgcaaaggtcttggctatctctgaaggcttttgttctatgagttctctttggattcggcttttagttcaagcaagtaagtgttggtcaaacgtattatttttaaattacatgaaatatattgagtttgtcaaacgtattatttttaaattacatgaaatatattgtgttgttggcttagagaattgatattgatgtagaaaattgttattgacttaggtttgaaatagttacttattataacgtaagttttatgacctaggttttgattagttatttatgtatgttaagacctaggtttattgagttacaatattattagttagttagtcagattatcattaagtacgagttcaaggttatgatgttggttacgtaggttatgacctaggtttagggtgtagggtacaattagtgggtgagctaggttttgattagttatttacgtaggttatgacctaggttttgattagttagttttgtaggttaagacctaggtttattgacttacaatattattagtttagggtttaggttatcattaagtacggcctcaaggttattaccttggttatgtaggttatgaactaggtttagggtttagggtacaattagttggtgacctaggtttccattagttatttacgtaggttatgagctagattttcattaaggacctacataagacatagataatcaattttttcaaataatttttcttctaaattaaattatcataatatgtttttagatttttctgtgttacaggcgtgaccatggtcttgtgttcaccatctttctgatcttgtagtcgttggtcatagataaaaaaatgtctggagatggtgattttgttcgtattgttttatattataatggtagcaaaattgagagccgacgtggtgttattttcgaaggagagaaaaggggaacacgtatcaatcacaactcaaccattgaagaattccataaaaaaattagtcaaaaattagttctcaaaggcaatgtatctatcactatggtcactgcaagaatatggtgcgatgataaatatatcagcatgaaagtaattgacaacgaagactcagaatttgtaataggagaattcttcaaccagtcaaggaaaaatttcttagagttgtatgtggattttgctggaatagagaatgtggctttaccaacgaggtcaattgatttcaattattctcgtggagcatcagcatctgctgctccagttgttaatttttctatggaagatgaaaatgaccctacttgggttatggatgacgatgatgaaaatatcgcaatggaagatcgtcttcttgctgagaatgctagtgcttcggacaatgatgaggatgatgtcgaagcgcatcacaaatacaagtacattacccattcgtgagagagcatgaaatccaacgacaagaggatgcaggggagtcttatttaccgcaacaatgtcaaggtgtgttaccaaacaatagttacttacatatatgtttgtttattatgtatgtattttattgtaataaatttgggaatttgcatatgtaggtgagggtaatactactttttaggatggaatcccacattacacctacattgattgggattatccgagtgaacaagattctggcagtggttatggttcaggttcagttgagggtccatgggtattagggaataagttgtttgtgaaacagaaatttgcatcaaaagaagacgtgcaaatgacaatcaagcgaaacctcatgaagaagcatcaggaagtggtcgtggttgaaagtacgccgacaaagttaagcatgaaatgttgtgcgcatgaccagaattgtccatggagggttagggtaatgaaaccaacatacggtgaaagatgggtggttaccaaatggggtggcaactacaattgcttaaatgatcacatatctcaggaccacaaacaacttgatgttgatgttattgtttcactcgtactaggtaagttattggatgagatgataatgatgagaagtaatgattttattgttattattaatgataacgtgattatttttttattattagggatgataaagcatgatccatcatgttcaattggactagtccaggaaaggataactcattcctatgaagtttcatatagaaaggcatggtatgcaaagcagaaagcaatggcaattatctacggtgattgggaggaatcatatgcatttttgccgaggtggtatgaatacatgcttcgcttttcaccaggttctgtttatcaaattcagacaaaaaattattatgtggctcatagaatcgttcatggaaaacgcgtgttccagcgcattttttggaccttcagacaatgttgcgaggctttcaatttttgtaagccggttattcaaattgatgacactcatttatatggcaagtacaaaggaaaattgttgattgccacagctcaggatggaaacaatgagtgtttgccacttgcatttaccattgttgaaggtgagacgttggaagcttgggaattctttctggataacattcgctcgcatgttacaaagaagacaaatctttgtcttatttctgataggcatcgaagcatgcatattgtctgcagtggagaggcaccccgggtggtaaccaccacatgcttatcacatcttttgtctccgtcatattgcgagcaattttaatcaaaagttcagaaatgaaaatttgaagagagcggttatgaatttaggtatggttaaaaactcatatattcatttttcatgtataactaaattttaatgttatttaatttctgtgcaggttatacaccttctattgttgattttgacatagcctttgcaagttttcgtgatgtgagtcctgaggttgcaaactggattgatagcatcctgaaggaaaagtggacacgtgcatatgatgttgagggacgaaggtatggacatatgacaacaaatttggctgagtcagtaaacaggattttgaaaggtgcaagaaacatgccaataatcacgttggttaagcacacatatagcagattggtgaaatattttgtttgcagaggccgatcggctcttaatgaattgcaaggtccttatgctcattgcaaaaatgtggttgttatgttgaaggccaatgagaccagttctactggtcattatgttcgtgcatttaatgttgaacgatctgtatttgaggttgacgatggttatgacaaatcgtactcggtaaacctccctgagcggttctgtcagtatgggaaatttaaggtgttcaagtatccttgtagtcatgctgcagcaaccgctttacatgttcgtcagtcaccggcacaatatgtggatgacgtattccttataacaaacctgatacaagcttactcatttccatggtagccaattggtaatgagcaggcaattccacctagtcatgatccagtggtcatacctgacaggtctatgttgcgtgcaaagggtcatccaaagtcaactagaatacgcaatgagatggacgaagttgaagctagtcaaagtcgtattaagtgtggtatatgcagattacctggtcataacagtcgaaattgtcctagtcgtccatctatttcatgatttgttgatgttgttgtcaatgttttctttatgttgttgtatttcgtaaggaacaagcgtcaattacaaacattggcaaaccgtaaaactatacaaaagcaaaaaaagaactaaacaaaaacaattttcttgaacgaatcaacagcttaataggacaagatctgaaatcaaatatccatccaagagcttattttgaaactttaatacattatgatgcccgagtaaatccataaaattaagcttttcacaaccattaaatccatttacaaatcatgcatggctacatctttgacaattagattacctgttttctctaattgtatgtgcctgtttgctctttcattttctccgtatagactacgaatgttacaatagaacatgagtagcaatatagagataaataaatgcaaactaacaaaatgataggataaaacaaaacaagagagatcaaatttaaggtattgtgtttgttactttgtttgaggaagatattcgcactcgaggttgcaagttgcaacgagtattagaaaaaccgtcttcaaattggacaattcaactactgaactgctcaaataacatgtctaaatgtctcactagtaggctactggatcgatttgcaattggtcagtagacattcttttagtttctttctgttcacaaactcttttttagcttagcaaaacttgaaactaattcttttaaactaatttggtttagtttggttcacaggaacaatttggtgtaatctctatgttttggttcagagcaccaaaacagttcagtttgattcaaagcccgaagtccaagtatagaaataaattgtatgcacttgtgtgaattttccatgcctttctttaatttgctgacataaggggatatattagagcttatcatcagcaaaaaagggtttatcgtcgaaggaattgaagtttagctaaataagagaaattgaatcacataattaagacgagcaagagattatcttagggtggattcaagggaattccaacacctaaccatttttattaattgatttttctagtacattattcaattgtgctcttgtttctttcaattaaatataaaaaagtccaaaaactcctaattgtttatctcttaaatcaaaagtaatcgataatttcattgatgtattgttgataaaccaaattttttattgatacaataatttctccttattttatcaattgtatacaactagtacacttatcgtattctcaacaaactacaacaatatactggtagaaggtgactcagttgatctttaagtcactttacgtgaagtccacattgcccacagtaggattagtgttagaatacattacagttcagagtaaactttcaatttaatttccatagaaataaacgtgagggaaataaagttagtagaactgtagaaatatagattacacagtttgtttgacgttagttaatataaatgtgctttctcttgatattcaataaatttgcatgttgtcatcgttaaaaaatacaaagataaattatttttaaaatttatctttttagtttttgaatttttatttatttttttatcccttaattttttagtatgtattacatttttgtttgcttggaactataataacatatccgtagagagagtctcacgatttttaaggcagcatggcacttccgacaggttcattccattgttcaaagttggattagtgctacagttaagagggaaagccttagcccttaggcttctactgaactgaacgccacgaaaaaataatatgatgaaaaggatgtattatttagatgaatagaaataacaagaaaaaatgtaaatttttatttgtttgaataaataagagagtagaaaacaaaaatatggtcattgcaaaaatgttcatagaaataaaaaatcaaaattaatttgaaaaacatgaactttttatttcattatttctcaacataaaaatattgttataaaacaattatttgattttttaaaaattaaacataagtaaaaaaacaaaaaaacaccgctaaccatttctcccagattggaaggattgatgaagatgaagaggattatgatgaagaaatgtagatgaacctgtgttggtttattcattacttctcatataggcccgtcattaattagaatgttcttatggggaattagagtagattttataggagggatagggcgttgaatactctccttaacccttgttttaggttaaaagtggagatatagattgttccaattagaagtagccatttgccagtatagttatgacttatgcatgagaaattttaatctcatgtaggtattgcttatagtaggcactacatttagattttgggtgtgttatggctcaaaatttcacggggatgcctatcttaatcacacttgtatctagcaaaactaactcaagctccagcaacatgatttgcatgcaaccttttgaatttttggtatcgaacttattgcacgatgagacaagaggaaaagaataagacgttagacggatagaaataaatacgaaataaattaaaaagatgtgttatttagatgaataaaaatagaaaggaaataagtgtagaaattcattatttatgtttgtttaggacaaatgaaagagaaaatacaaacagatgaattgtttgaaaaaaagtatacattttttttaaaattatttccattattttttattatataacatccttatttgttttttaatatataagcaccactaatcgctgccctgtaaaaccaatctcgcttcaaactagtttgttcaaacttaaaataagtattttttaaataagcatttatttaataaacaaataaggatgatcaaaataaacagaaaaaatgttgtttaagcataaacataaagaatgatttgaataattaactactcaatgtgggacttgtgtctaccatgaggagaactttatctaaggaggaacaaaaagaatgttcttatggttttgaatatacttggaatactaataagaaagaggtgaaactaaaattccaaagtacagttaactaggtcctagctctagatagatccacatgcttacatgcctcagtccctgattggagatatatgaagtttatatttaatatggataagtcctaggaaaaacagaatagtcagggctcaatctcaaagtttggaataactataatttcttattaaaatgccgatctaaatggttcttatacttgctcccttcaccaaccacagggaaaacccctattgaaaagccactgcataagaaacccactgggaagtgtgatcaaatatcagaaaggaggttgcagtaaaagctacaaccatagcagcaacgaagatcaaaagtaacacaggctgcagtaaatactgatgaagtgaaatttgacaagaatgagagtatagacgtagaagtcaatactgcgattgcatttgtcaatacgctcattggtttggatcaattaatgtcaatgcataacttgattaatcttttaattaccacttaatcactattacaagttaattttttaagttatgatattaaaaataaaaggaattgacctagcttgaaccatgcgagctctctttgcatttgaatggttgctctaaaactggacaatgctttgaattcaagtggcagatgagcaaaatgtagaacgttgttaccttcattggccactgctcgaactatatgctctatctttttaagtatactaaaaaaaaattgcttatttttcgatataggacagccaagtgcagtaggttccgtccattgttggggtcccttatcatggtcactagtttactattatcgtcaagaaaccaactaagagcctcatcatttcctgattttagtgcaacaatattaatatgcaataagaggagaaaaatgtcgtcaaattaacaagaacataacaaccatcaacaaattgagtgtaataaaatcacgacacatatttagaaaaaattttatgtaatattttttttatttaaatttaagtcttttgtttacttatttttcttatttacaaaataaataacaatctttaacattaataacaaaaatataaaaatattaaataatataatatacaaaaatataaattaaaactactttagagctgaaaactaacttaaaaatgaaaaaaaaaatgatcattttgagacggtctctggatgttcccgtaaaaataagagtttgttatcaagagttcaacacaaagatatgtagaggtcggtcgaaacttaactaggaaggtaattaaacaagacctaatggagtgaaatatagattgacggacgatatgtcttaggacggagtggagaaaaattataagcttggtggagggttaaacccattagtatttagcttattttttctctctttaatcttatttccgtttttttcttcccctctccctttctctttctttgtctcatttccgatttatcattggattcatctaccaccgatcccaattaacttgggttaaaggtgctgttgatgttgatgttaatgttgattttgaagtcgttaaaatttttatgaagttacataaatagttaaaaataaaaaaaaaattaaaatgtgactttgaagtgactttgaagtagttgaaatttttatgaattcaatattaaaataaaataaaataagagatcaaaatcgtaaaattttttcctccatttgacgtctcttagtgagaaatatggtttggttaggactcattaattataatgtcatttctcattttctaacacattcaatcaagaattttttttattacttatttctcttcattttaattttatactcattataattttgttgtatataataattctttttaaatcgattaagattaagtctcaatgaaagatgaatgtgtaacaaaaaaagctttttctgtgatatgatttgctcccttcaccaatccacatggaaggaaggggacaaactttgacgtgggttatgcagcatagtctcaaattaaggcgggaacaataagaaaggtaatatttcatgacatagaaaatctagaataatctcaaatttaaacacaagcttgattgttccacaaacaaataataatacagtgccttaaagtaatgccaatgtctgtagttctgtaataagttagtcctgtttggacaaacgataatatctagaccacaagtgtttgttgaaaaagttaaattgaaagagaagaaacaaaagtattgggaaaagccccattgaagccactgcataagaaacccacttggaagtgtgatcaaatataaaaaaggatgttgcagtgaaagccacaaccatagcagcaatggagataataagtaacggacgcccaaaagtcaagttgggatgtagtgatatcacaaattaagtcgctttgtgcgtgttgcgaaattagcaagtataccgttcgttcaagtaataaagtaataagtaaagatcgttcccacgaggattgatgtaccgattgtattgtaactagtatctataagttggatgacaaacgtttaaaggaagttttgtgttgtgtgtatcaacgattgaaattaaagactaaactatgaacattaaatgcttatgaacaagtaaattgatattgtaacgatataagggcgatagtagttaggacaatccacactcaatgctccccaccttcttacacagattgtttactatattcattcacctcaaactactcaaatcatgcatcttcataagttgtagtcaagtcttaatcccttagtgacataacccttcaacccaattaaaaaccctagttccctagtagcttctatgaggttaagcattaaagtgatgcattaaacgatttgcaaacatacatttctatctcaagacaatgtaaagttcgtcacttcactcaagtccaagcatagaatttcaacattcctattgcaaaccctagctctaaatatctcactagattgatcaattccaacaagataccaacattcattcaagcaaagtaaagtgaaataacttgatataaatgaataatagcattcaatccaatccaaagagggttacatcaagtgttggccctaactacaaataagaactagccaaacctaatcatggttggcaatgagctaacaaaaagaagcatgcccagctgaagtacaaaggagaagaaggagaagagaaatgtctccacttgaatcttcaactcccaagccctagctaagctcccaagcctttcttcagcctttcttttgtgatatttcgtgcaaaagtgccttgaatgttgtaggtctttggtatttaagtttgggaagtgaaactcccagttttcccttgacagcttttaaattgtgcagaagtcgagcttccacgctgatggcgtggaattcacgctggcagcgtgagatagcagaacaactagcaaactttcattcaatggcgctggtggcgtgaatctcacgctgatggcgtgatattcacgctggtagcgtgaaatctcagaagagaagctcccatttctccagctagcgcgattggcgtagaacatggcgctggtagcgccaggtacttttgctcaaacaggattgaattggtgcattcctactatacaattgcccaaattagctgagaatatggtagcaaaggaataatcacaattcatagcatttatggacaattattgaagatttatgattgattccttgcttctattagcttggaaagtactatatgctaggagcatatcattgcgaatcttgatgaagtgaaatttgacaagaatgagagtaaagacatagaagaagcgaataatgcgactgcatttgtcaatatgaagacagtaaaccaggcattggtcttatcacctggaacagtcagagcagtcacaaatgctacggtagcaacaagtgttgacacaagcatgcctgattcggctattgctttggttgtttccttaatttcttccgataacttcttgtgttcatcataaaatacatcaattggtctcttgcccatgtggtttaaaattgtacttagttcatcaggaacatacgcctccacgaactatttacaaatcaagagtatttgtaaatgatggtatccaaatgcataacttaatctttcaattatcacttaataactagagcaaattacagcaacacctcctaagatctagtgtaattacacaaacattccttaggtatgagagtaaggtttgaggggatgttaatgtaatgatttcaaacataaaaagaatgttagtgtaatttttatttaaaattatattacacaaatatttattgttacaaatgcacttgtataatttttatttaaaattttctatctatatattggcagtttagcatttatgctaaagacaatggattacaaattttaaaaaaaaattgttacagtaatcaacaaatactacatacaatgatttctatttttaattaaaacttgttacttttaaagatttaaaatcagtctatttaacataagcctaaaattagtggaattttaaatttttaaaataagatagctagaactgattgatcccatgcgagtgaataaagaatggttgaataaagaaaactaagcaaattaattgaccttgaaccatgcgagctctctttgcatttgaatgcttgctcttaaacttgacaattcttcgaattcaccttgtggaagacgcgcaaccaagtgtagaatgttgttacctccatagtcctagaagctctgttaatcccggtagtataatattaaatatttctttttgtcgaaatagcacaaccaagtgcagtaggttccatccatttctgcggtccctataagtgactaattcaggattattgtcaagaagcgtctccacagcctcaacatctcctgattttattgcatattcacgattctagatctgttccaatgtttcaacttcagtcaatacttctccaaatagccgatcacaaacgtctgattccttggcaaacataaatttgtgttattaattagaataactcaacaaacatcaaataccattattagactggatatagataattaaggactaattcttaattttttatataaaacaaaaatatatataactttctaaaatcaaaatcaaaatggaaatgatgtcaaataagatctaaattttagcttagaacacacaaaaaataaaaagctattttcaacttgtgaaaggttacctgactctcctctaggcttttcccccagcatcttcactactgtaacgtcctcttcttttcttgcaagttgcaagggccagagtagttggatatttttcaaataatcgcaatgccaaatctgttgtatgcacaaattaaatagtataaggcaatgtaaattaaaactccaactaaattgaaaaaccacgtacgagttcatatatatctccttttatatatatatgaaatcaatgagaatttagctaggacctctttggttttagaggatgatatcacagtctttcataaacctaatattcataattaattatttcaactgattctcattaaatttgttattgaattatggtcaagtgtatcgaatgacgttggaattgtaaacattatatatatatatatatatatatatatatatatatatagcttatggtatctgatcggttcaatgggttcgattcagtttgtaaaacatcataatatgtaaaagagaactagattacaaaaaggagaaataaggttgtttaattagttttacacttaccaaacatgtcgaacctaatggtcatcataaacagtcgttcaatatccttgaaatccattttgtcaagcactttctgagaggacaaaatgtccaccattctgtagaaaccatgtaaagcagccaagtgaactggaagcatcccatctgagtttcatattagcatgtcttctggcctcatacacttaaccaactcattcacaatatcatcgctggattcccttgctgctacatgaagagctgtgtttccacttgagttttttattagcatgtcttctgccctcatacggttaaccaactcattcacaattccaagccttacataatatactgctagatgaagagctgtgtctccacttgagttttgtattagcatgtcttttgggctcatacggttaaccaactctttcacaatttgaaggttgtatttccttgttgctagatgaagagctgtgtctccacttgagtttcgtattagcatgtcttctggcctcatacggttaaccaactcagtcacaatttcaagccttacgtaatatactgctagatgaagagctgtgtctccacttgagttttgtattagcatgtcttctgggctcatacggttaaccaactctttcacaatttgaaggttgtatttccttgttgctagatgaagagctgtgtctccacttgagtttcgtattagcatgtcttctggcctcatacggttagccaactcagtcacaatttcaagcctttcttaatacactgctagataaagagctgtgtcttcactatcatttaacagaatgcgtaccatatcaggacatttatcaataatcgattttgattccagccactcatccagccgtatatgtgtctccagatcttcttttaaagaacctgcaatcctttcaaacttcacattataacatgtcctttatttaataatcataacttttactatttagttacaaagaagacccttttaatttctggtttaccctaaatctgtaaaaattctcttggaaacttgtctcatattttgaaaattcctaataatttcatcatttgtaaattgaaatctagctgagttaggcgaagggatccaatcatcaatcacctttaattaagtttgaaaattcatactttaaaagtgattctactttttattttatctttcgaataaaaaaataattttctaaacccattgttggaataccattcttaataatagtataggtatttttttttaaagtcaagcgatttcacattcatttttttcaaattgtaaaataaacaaactcttaagacatgatctctgaaatacaccttgttgtgaatgcaatagtttcaagtataacttactcagctcttctggagtcatttcattcactcctctacttccatgttttggtgtcagtgagtttgttgaagtggcaattggagtttgctcatgactttgataaagagtatgatcttgtgttggtataatctgaattatgtggtcatctgaaacttcgacgatattggttttcatgatttaattctagggaaaatgaagtgatttggatacctctctaaaattccttgttgtatcaatgttgcttctttctttccagactgcgaagcttgaacatattagacgtgtaaatgacatctacagaagaaaattaaatgttgggatggtcttggttttggaacatgtgttgtttgttctagtgtttaccttcactctctagtttctaaaatgtctgagttacttgcatccttgcctttgcagaaaacagtgagtgcagacttttaatgtctttgattttctaaaagatattgtcagaagggtttctgatttaggtggttctgttgtaactggtgatgatcatactgtcactaagatgttggtgctctgattaatactcatgttagtaggaacatgttttctgtgtggtgaattttgtttatttattttatattaagaaagatgatgataatgacagccacgaggatcccaagagaaataacaaggtaacatatcaattcagactgagttggcttaaatttttcttttgtgactaaaccttctgctgagtaattatctcttgtcatgcagactgtgaagcttttgctggttacaaaataatttacttcagtcattcgggaaattcacaagttgcttcactgacttgcgaatacaagtacatttaatagtctgtaagccttactatacaaagaaccaaaactatctggttttcttaaaacttttggtgagaactgttgttgtaattgagcaaactattcactatagaatcagaactaacacataatgtaaaaattctagctgagagatgcaacattctaaagaacctcgcagcagcttgatgttaaatattatctgaataatgaatttttttttcttcatgatttgcacagagcctggcgttgcagtggcagaggaaggtggtatcaatgtcagaagagaagcatgaggaataccctgaatggtcattgtctgatatggaaaaaatgaacattgattccatgcaactagctaattaacttaaatggaaggattgatgaagatgaagaggattatgatgaagaaatgtagatgaacctgttttaatttggtttagaaagttctaattgagaattagagtagaatttttaggaatagtattagacaaatccttagtggttaggaagattaggagggataggacattggaaactctagtccttacagcctttgttttagtataaaagtggagatatagattattccaattagaaatatccacagtattgttatttgagaaattttaatctcatataggtcttgcctatggtaggcactacattcagatccttaaacttacggattttgattttgtttgggttgttagctttgattgtggcgttgtgtatgcaagtctgttattgtatcacacgacgtttcctctcgagtacaaattgagagcaaatctgtggagcaaattaacttactgatccgacgacatgatttgcagttgaaccttttttgttatcttgaatttgatgagaaatcaaataaatggaaaagaaataatagagatataaattaaagtttaatatctatgtactaacgtttaacagtataaaataattttaggattttagaaattattattcaatcataaattaacgttttaaaagtaaataaatttattatatatacacaatgaattgtgattagctggttatataaatctttttacactctcaaatcataactcttatctagaaataaatacaaaataagatgaaaaagatgtattatttaaatgaataaaaataacaagaaaaaatatataaatttttatttgtttgaataaataagagagtagaaaacaaaaatatggttattgcaaaaaatattcatacaaataaaaaataaaatttaatttgaaaacctgaactttttaattatttcgttatttctcaacataaaaatattttgttataaaacaataatttgattttttttttaatttaaacataagtaaaagaacactgctaaccatttctccctccatttcacgtcacttggtgagaaatatggtttggttatgactcattaattataatttcatttctcattttctaacacattcaatcaacaatattttttattactttatttctcttcattttaattttatatttattataattttgttgtatatagtaattcttgtaagatcgagtaagattaagtctcagtgaaagatgaatgtgtaataaaaaaagctttttttgtgttatgatttactcccttcaccaaccacatggaaggaaggggaaaagctttgaggtgggttatgcagtatagtctcaaattaaggcgggaacaataagaaaggtaatatttcatgacatagaaaatgtagaataatctcaaatttaaacacaagcttcattgttccacaaacaaataataatacagtgtcttaaagttatgccaatgtctgcaactctataataagttagtccagtttgggcaaacgataaaatctagaccacaagtgttcgttgaaaaagctaaattgaaagagaagaaacagaagtagtgggaaaacccccattgaagccactgcataagaaacccacttggaagtgtgatcaaatatcaaaaaggaggctgcagtgaaagccacaaccaaagcagcaacggcgataataagtaacgcacgcccaaaagtcaagctgggatgtagtgatttcacaaattcgctttctgcgaatcttgatgaagtgaaatttgacaagaatgagagtaaagatgcaaaagaagtgaataatgcgactgcatttgtcaatatgaagacagtaaaccacgcattggtcttatcatcacctggaacagtcagtgcagctgcaaatgctacggtagcaacaagtgttgacacaagcatgccagattcggccattcctttggttttttccttaatttcttcagataacttcttgtgttccttataaaatacattaattggtctcatgcccgcgttgtttctcattgttcttagttcatcaggaacattccgcttcactacctatttacaaatcaagaggatatgtaaatgatggtgtccaaatgcataacttaattaatctttcaattatcacttaataactagagcaaattacaacaacacctactaagatttagagtaattacacaaatattttttgagatattagagtaagttttaaggggatgttagtgtaatattttcaaacatataagagatgttagtgtaatttttcaaatttaaaagaaattagtgtagaaaaataaaaaatggaattacatataatcatatgaaatctcaggaaaattattgtaatttcctcaaatagcttttacatattaaatttgtaagaaatacaatttcaaagttaagatatttaaaaaataaattttaggggtgatattcatttttacaaatgcacttgtataatttttaattaaaattttctattatatattggctttttaactattatgctaaagacaatggataacaaattttaaaaaattattacaataatcaacaaatactacatacaatgatttctaattttaattaaaacttgttacttttaaagatttaaaatcagtctagttaacataagcctaaaattagtggaattttaaatttttaaaataagatagctagaactgatcgatcccatgcgagtgaataaagaatggttgaataaagaaaactaagcaaattaattgaccttgaaccatgcgagctctgtttgcatttgaatgcttgctcttaaactggacaattcttcgaattcaccttgtggaagacgcgcaaccaagtgtagaatgttgttacctccatagtccactgctcgtcctagaagctctcttaattcccgtggtataatattatatattatttgttgtcgaaatagcacaaccaagtgcagtaggttccatccatttctgcggtccctataagtcactagtctaagattattgtcaagaagcatcttcacagcctcaacatctcctgattttattgcatattcacgtttctgttccagtttttcaacttgagtcaatacttctccaaatagccgatcgcaaacgtctgattccttggcaaacattattttgtgttattagaataactcaacaaacatcaaataccattattagactggatatagataattaaggactaattcttaattttttatataaaacaaaaatatatataactttctaaaatcaaaatcaaaatggaaatgatgtcaaataagatctaaattttagcttagaacacaaaaaaaaaaaaaaagaagccattttcaacttgtgaaaggttacctgacattcctctaggctcttcccccagcatcttcactgctgtaacgtcctcttcatttcttgcaatggccaaagcagttggatgtttttcaaataatcgccttgccgaatctgttatatgcacaaattaaatagtacaaggcaaggtaaataaaaactctaaataaattgaaaaaccacgtacgagttcatatatatctccttttatgtatatatatatatatatatatatatatatatatatatatgaaatcaatgagaatttagctaggacctgtttggttttaaaggatgatatcacagtctttcagaaacctaatagtcataatcaattatttcaactgattcaatgggttcgattcagtttgaaaaacttcataatatgtaaaagagaactagattacaaaaaggagaaataaggttgtttaattagttttacacttaccaaacatgtcgaacctaatggtcatcataaacagtcgttcaatatctttgaaatccattttgtctagcactttctgagaagacaaaatgtccaccagtctgttgtcaccacatttagcagccaagtgaactggaagcatcccatctgagtctggtattagcatgtcttctggcctcatacacttaaccaactctttcacaatttcatctctgccttcgcttactgctagatgaagagctgtgtctccacgtgagtttggtattagcataacttctggcctcatacggttaaccaactcatccacaattccaatcctgcctttgcttactgctagatgaagagctgtgtctccagttgagtttggtattagcatgtcttctggcctcatacgcttaaccaactctttcacaatttcatctctgccttcgcttactgctagatgaagagctgtgtctccacgtgagtttggtattagcataacttctggcctcatacggttaaccaactcatccacaattccaatcccgcctttgcttgctgctacatgaagagctgtgtctcctcttgagtttggtattagcatgtcttctggcctcatacgcttaaccaagtctttcacaattccacccttgccttcccttactgctagatgaagagctgtgtctccacttgagtttggtattagcatgtcttctggcctcatacggttaaccaactcatccataattccaatcctgcctttgcttgctgctacatgaagagctgtgtctccacttgagttttgtattagcatgtcttctggcctcatacgcttaaccaactctttcacaattccacccttgccttcccttactgctagatgaagagctgtgtctccattatcatctaacggaatgcataccatatcaggatattcatcaataaccgattttaatttgaaccactcatcataacaccatataagcatgcacagatgttcttttaaagaacctgcaatcctttcaaacttcacattataacatgtcctttatataataatcataacttttactatttagttgcaaagaagacccttttaatttcttgtttaccctaaatttgtaaagattctcttggaaacttgtctcaaattttgaattcttaatcatttcatcatttgtaaattgaaatctagctgagaaattcgagattatgtagtagtcgaagggatccaatcatcaatcacctttaactaagtttgaaaactgaatttcaattttgtgtttcaaaattaactctatgatgataagtaaaattgtttttgagagaagtaacttattttttcttttcttcagttgacaaaagctaagatcttaacatgctgcttatacatatttatactcatactttggcaaaaaaaaaattaaaatatagcaattttaataaaaaaattacgaaaatactgcaattttcaaactatttactattgtataacaattaatcacgtctggaccatacgtgttcaaacaagctccagccaggcgtgactgaagctcagtcatgccccagctaggcgtgactcaccaggtggtgacacgtgccattttaagacacgtgtcattttacggcgtgatatatataaactttggaaggtcataacttttgactagaatgtctaattaaggcgaaaccgatgccacgcgctcgaaattgaaagaagaagctctaaacaagtcccaaaaaggacttggtcaaattttttctaaaagatgtctctaagtatctcaaaattacgatttaatcttcgaaccttcaaaaaaattcttggtttctaatatttttatttatttaattagtgaattgcatgctattttttatttttctaattacttatcttaatttcgagtatttttacataaaatacgcctccatcggacatgattgtcatgaaggcctatttcgagtattttccaaaaattagcattaaatatcataaaatattattatgttttcatttatatgtattagtataagagcaaataatttatacacgaataatatgtaaaaaaaattatgatgtcactcatggtttcaaattgtagttatatttacagctacaatttcgtggtaattttttatattggagaaacttataaaaaatacatttcatgtcatgattgtgattaattataaagcttttatgttgcaaacataattatagttgtggacaacaatttaaagtcaattgtcattgaattataaatcaacacatataataagtttgatcatgtaaatttttttatattaacaatttacagaaatttaaattttaatattgagttaaaaataaaaagtttaaaatactcgaaattaagagaagtaattagaaaattactctaaattaatagaagtaattagaaaaataaaaaatagcatgcaattcactaattgaataaataaataattagaaaccaagaagggaatcgctttgattgcttgcaacagcttatcgatgctcgttagcgatgaagtccctcaaaccagaagtttcaaaagggcagagaaatgaactttacatactgatatcacataccgaagggaaggcctaattgtaccactccccctgaccttcagcctgaactgattgaagttggcttgagagttccgtgccaagcataaagattgaatcaataagactatattctaatcctagaaatgccataactctctttctgttctgaatgtctcgactttctttctcaaaaaaccggacaagggtgcgaaaatagcaagaataaattttttgaaggttcgaagattaaatcgtaattttgatatacttagagacatcttttggaaaaaaattgaccaagtctcctttgggacttgcttagagcttctcctctcaattttgagtgcgtggccaccaatttcgtctcaatcggacattccaatcaaaagttatgaccttccgaagttgatataaatcacgccgcaaaatgatacgtgtctcaaaatgacacgtgtcaccacctggtgagtcacgcctggctggggaatgactgagctctagtcatgtctggccgggacttgtttgaacacgtcttgtccagacgtgattgattactatacaatgataaataattttaaaactacgatatttttgtaatttttttattaaaattgctatattttaatttttttaccctcatactttaaaagtgattttacttttttttttatctttcgaataaaaaataattttctaaacccattgttgaaaaatcattcgtataataatagtatcaatatattatttttaacgtcaagcggtttcaaattcaatttttttttcaaattgtaaaataaacaaactcttaagacatgatctctgaaatgcaccctcttgtgaatgcaatagtttcaagcataacttactcagctcttctggagtcatttcattcactcctatactgccatgttttggtgacggtgagtttgttgaagtggcaattggagtttgctcatgactttgattggttgtatgatctggtgttggtataatctgaattatgtggtcatctgaaactccgatgttggagttcatgatttaattctagggaaaatgaagtgaattggatatctatatgaaattccctgttcgatcagtgttgcttctttctttccagcctgcgaagcttgaacatattatatatggtggtaaaacaagagcccttaattagttttccaacttgcacttaaaataattattccaaatatgacattttgtggattacagcaatgttccatttttagacgacttattggtagactttatagtggtacgtaagattaaaaaaaaaatcatttttttttctttagtgataaatctcattttgaaatcttaggagaaaagagaggataagaaattattcttttttttaatattatacagatctttagaattcttctataaaaactcattctctatatttagatatttgttcatctcttttattgggagatatagtgaagatcagatctcgagttcaagatccttgctaaagatctagcactagaaatacttacatctttagtggtagatttcaaattgagttcttataccactttttaatagaccctataatgtcaagtataattgaatatttctttcatttttttcttaatagtagatctcattttaagatatatttaatattaaatcttgaataaaaatcttgagttcaagatctaatattcactatatcttttaataaagaatgtgaagagatctctaacataaaaaataagttcttgtaaaagaatccttaagatctacacattattaaaaaaaaaaattcttctttctcactccctaaatctcaattaaaaatcttctataaaagatcttattgttgacgaaaactttctgccatagctgtggttatatatttatctaccttccgttgacgcatttaattctttgaatatatcccaaaactggtggtctttttatactagttatagtcaactacgccaacaaccattgaattacaagatgcatcggaaaatgtatgaattttattaaaccactaataacaatcatcgaattcacagcaagactagaaaaaatacttatttaatattttggtgaaatctattcaataatttattcagtcagtcatattaataattattttttgacattttaatattttatgttatgttacataaattctttcattaataataataaacataaattaataaataaatagatttatcatatttttttagtttcaaaaattttaatttatataatcatatttgaaaaatgaatttatcaataatctatatatttaaagataaaaataattatttatctaaaagcatctttagtgttggattttagaagagatcttctgttgaaaatctctcatttcctagatccatcactaaagagaaatgcagatctccacgtggagatctgattctttttcaagaatcctgaatatatgtacggagttcaaaaaaatgtttttttatgttgtaacagaccacaaaatgaatgggaaataacaactcacaactcaacgaaccattatagaagagaaaatggaaaaaagaagaggaacaaaacatacctatggggaagcggaggagaactccgtgaaagggagggggaagaagagagaataaaaaggggggagggggagtgtctagtgggggggaagggagaannnnnnnnnnnnnnnnnnnnnnnnnnnnnnnnnnnnnnnnnnnnnnnnnnnnnnnnnnnnnnnnnnnnnnnnnnnnnnnnnnnnnnnnnnnnnnnnnnnnnnnnnnnnnnnnnnnnnnnnnnnnnnnnnnnnnnnnnnnnnnnnnnnnnnnnnnnnnnnnnnnnnnnnnnnnnnnnnnnnnnnnnnnnnnnnnnnnnnnnnnnnnnnnnnnnnnnnnnnnnnnnnnnnnnnnnnnnnnnnnnnnnnnnnnnnnnnnnnnnnnnnnnnnnnnnnnnnnnnnnnnnnnnnnnnnnnnnnnnnnnnnnnnnnnnnnnnnnnnnnnnnnnnnnnnnnnnnnnnnnnnnnnnnnnnnnnnnnnnnnnnnnnnnnnnnnnnnnnnnnnnnnnnnnnnnnnnnnnnnnnnnnnnnnnnnnnnnnnnnnnnnnnnnnnnnnnnnnnnnnnnnnnnnnnnnnnnnnnnnnnnnnnnnnnnnnnnnnnnnnnnnnnnnnnnnnnnnnnnnnnnnnnnnnnnnnnnnnnnnnnnnnnnnnnnnnnnnnnnnnnnnnnnnnnnnnnnnnnnnnnnnnnnnnnnnnnnnnnnnnnnnnnnnnnnnnnnnnnnnnnnnnnnnnnnnnnnnnnnnnnnnnnnnnnnnnnnnnnnnnnnnnnnnnnnnnnnnnnnnnnnnnnnnnnnnnnnnnnnnnnnnnnnnnnnnnnnnnnnnnnnnnnnnnnnnnnnnnnnnnnnnnnnnnnnnnnnnnnnnnnnnnnnnnnnnnnnnnnnnnnnnnnnnnnnnnnnnnnnnnnnnnnnnnnnnnnnnnnnnnnnnnnnnnnnnnnnnnnnnnnnnnnnnnnnnnnnnnnnnnnnnnnntttctttaaaattaatgttttgaaatttttttattatcaattttatatatttttcatttaattatcttttagttataaataaaaattatttaaattttatcatttcttaatatcaatatatttttctatattttattaattaaaattaattatttaattaaataaatttaacttaatcaaaatttaaatatttaaaaataaaattcatataatagttattaaaaattatctaaaataattaaagaaaaaaatcttccattttgagtgtcatccattataaaggttaaaaagatggtctgacacatttttataaaggttaaaaagaggccgtctatacgggagagtgtaatggatctcttatcatgaaaaagtgttttatgatagattaccttgtttaaaaatcaatgaccacaaaattttcttcttttagtattgtcttttcttttttgtcgtcctctttcctgtactagcttttcttttttgtcgtcctctttcttctcttctttcccattattcctctcttcgtcttagcggcaacggtggtgccatgacggtcgatgatagtggggatgttgatgcgtcgttgccttgtggttgtgcggagtaaactagagagaactctcgagagggtctttcgccgtttttcttgcggtgttctgcaacaagatttcgaccggataaaaagaatggaagacgaaacagtcacaaagctttatataactattgcctcacttaaaccaaaattggattcaattgaccagattttagtctcccaaagttttgagctttttgatatttgttgtgtacgtgttgattttttctcatgggtgccaagttacgagtttgtttcttgcataaacattgtttctattccattttactctcaattttgagtccaatttgggagaataaaagacctaagattttggttttgaaaatcagatgacatttttttatgaggatttgtgattatatttgaaattgcagtttcaaggaaattattgtaccattgatctgtaatatttgtaatatagccttgttttctgtgttcagatatgtgatgggtggtggtgcatggtggtggctccgctgccgtagtgaccatctgtgtatgtggtaaagggaaaaaggaggaaagggaggggctgctgaaaattgctttctgcgtaggtgtctttgtcgaagacaagaaaaaaggaagaagaaaggcgaaaaaaatgaaatgctgccgccagaggtgatttttggcaacggcgcatagtggttagagggataaatcaggtaagaagaaaaggaaaaaaataataaagaaaatagaagaaaaaaaattaatccatgggattaaaatttgataaatccaatggtgaaaattcactttaccgtcatgtgagttacactctcccacgctattatgtgtcagattagagattaaattgtacattaagactaaaaataatattcaaagaaagtacatagtctaaacatatattttatccaaaatatttcaaatctttttgaattagttgtttgatattttacaccgtgtttcatactaaattatccgatttgcaagatgtaactatatataagatttaagatttaggatttaaatcaaggataataagaaccctaaatcctaaattataaatcacatggaaagaaaaagactttgacatggtgtatgtgtagtttacgaaaaagataatatggattaattatagtgtgtttgaattttggctttaaaattatgcatgaacataatgacatgagtcaaacttgattttatctaaaactagttaaatggttcatgacttgcatagtagtaattttacaatttataatttcttataatattataaccttttaagataacatttattattattattattattattattattattattattatttatgacaatttaataaaaccatgataataaaaattaccataattattacaaatcatattagtgttaattaaattataatccatattatctcatgtatcaatttcttttactataaaaatatccctaattaaataagagagaaatcatattaacatatgtatttagtatagtatttttgaaaacatattattttagaacaaatttattattatcaacataattaattgttttttaaatcttgatgaattagataattgagtctaataaataggcatggaggtagtatataatatagtagatataatagatagtagatttagcatgtttagttattttagtagaatcaaatttacttgaaaaaaattatgatggagttgaagtaggaataataactnnnnnnnnnnnnnnnnnnnnnnnnnnnnnnnnnnnnnnnnnnnnnnnnnnnnnnnnnnnnnnnnnnnnnnnnnnnnnnnnnnnnnnnnnnnnnnnnnnnnnnnnnnnnnnnnnnnnnnnnnnnnnnnnnnnnnnnnnnnnnnnnnnnnnnnnnnnnnnnnnnnnnnnnnnnnnnnnnnnnnnnnnnnnnnnnnnnnnnnnnnnnnnnnnnnnnnnnnnnnnnnnnnnnnnnnnnnnnnnnnnnnnnnnnnnnnnnnnnnnnnnnnnnnnnnnnnnnnnnnnnnnnnnnnnnnnnnnnnnnnnnnnnnnnnnnnnnnnnnnnnnnnnnnnnnnnnnnnnnnnnnnnnnnnnnnnnnnnnnnnnnnnnnnnnnnnnnnnnnnnnnnnnnnnnnnnnnnnnnnnnnnnnnnnnnnnnnnnnnnnnnnnnnnnnnnnnnnnnnnnnnnnnnnnnnnnnnnnnnnnnnnnnnnnnnnnnnnnnnnnnnnnnnnnnnnnnnnnnnnnnnnnnnnnnnnnnnnnnnnnnnnnnnnnnnnnnnnnnnnnnnnnnnnnnnnnnnnnnnnnnnnnnnnnnnnnnnnnnnnnnnnnnnnnnnnnnnnnnnnnnnnnnnnnnnnnnnnnnnnnnnnnnnnnnnnnnnnnnnnnnnnnnnnnnnnnnnnnnnnnnnnnnnnnnnnnnnnnnnnnnnnnnnnnnnnnnnnnnnnnnnnnnnnnnnnnnnnnnnnnnnnnnnnnnnnnnnnnnnnnnnnnnnnnnnnnnnnnnnnnnnnnnnnnnnnnnnnnnnnnnnnnnnnnnnnnnnnnnnnnnnnnnnnnnnnnnnnnnnnnnnnnnnnnnnnnnnnnnnnnnnnnnnnnnnnnnnnnnnnnnnnnnnnnnnnnnnnnnnnnnnnnnnnnnnnnnnnnnnnnnnnnnnnnnnnnnnnnnnnnnnnnnnnnnnnnnnnnnnnnnnnnnnnnnnnnnnnnnnnnnnnnnnnnnnnnnnnnnnnnnnnnnnnnnnnnnnnnnnnnnnnnnnnnnnnnnnnnnnnnnnnnnnnnnnnnnnnnnnnnnnnnnnnnnnnnnnnnnnnnnnnnnnnnnnnnnnnnnnnnnnnnnnnnnnnnnnnnnnnnnnnnnnnnnnnnnnnnnnnnnnnnnnnnnnnnnnnnnnnnnnnnnnnnnnnnnnnnnnnnnnnnnnnnnnnnnnnnnnnnnnnnnnnnnnnnnnnnnnnnnnnnnnnnnnnnnnnnnnnnnnnnnnnnnnnnnnnnnnnnnnnnnnnnnnnnnnnnnnnnnnnnnnnnnnnnnnnnnnnnnnnnnnnnnnnnnnnnnnnnnnnnnnnnnnnnnnnnnnnnnnnnnnnnnnnnnnnnnnnnnnnnnnnnnnnnnnnnnnnnnnnnnnnnnnnnnnnnnnnnnnnnnnnnnnnnnnnnnnnnnnnnnnnnnnnnnnnnnnnnnnnnnnnnnnnnnnnnnnnnnnnnnnnnnnnnnnnnnnnnnnnnnnnnnnnnnnnnnnnnnnnnnnnnnnnnnnnnnnnnnnnnnnnnnnnnnnnnnnnnnnnnnnnnnnnnnnnnnnnnnnnnnnnnnnnnnnnnnnnnnnnnnnnnnnnnnnnnnnnnnnnnnnnnnnnnnnnnnnnnnnnnnnnnnnnnnnnnnnnnnnnnnnnnnnnnnnnnnnnnnnnnnnnnnnnnnnnnnnnnnnnnnnnnnnnnnnnnnnnnnnnnnnnnnnnnnnnnnnnnnnnnnnnnnnnnnnnnnnnnnnnnnnnnnnnnnnnnnnnnnnnnnnnnnnnnnnnnnnnnnnnnnnnnnnnnnnnnnnnnnnnnnnnnnnnnnnnnnnnnnnnnnnnnnnnnnnnnnnnnnnnnnnnnnnnnnnnnnnnnnnnnnnnnnnnnnnnnnnnnnnnnnnnnnnnnnnnnnnnnnnnnnnnnnnnnnnnnnnnnnnnnnnnnnnnnnnnnnnnnnnnnnnnnnnnnnnnnnnnnnnnnnnnnnnnnnnnnnnnnnnnnnnnnnnnnnnnnnnnnnnnnnnnnnnnnnnnnnnnnnnnnnnnnnnnnnnnnnnnnnnnnnnnnnnnnnnnnnnnnnnnnnnnnnnnnnnnnnnnnnnnnnnnnnnnnnnnnnnnnnnnnnnnnnnnnnnnnnnnnnnnnnnnnnnnnnnnnnnnnnnnnnnnnnnnnnnnnnnnnnnnnnnnnnnnnnnnnnnnnnnnnnnnnnnnnnnnnnnnnnnnnnnnnnnnnnnnnnnnnnnnnnnnnnnnnnnnnnnnnnnnnnnnnnnnnnnnnnnnnnnnnnnnnnnnnnnnnnnnnnnnnnnnnnnnnnnnnnnnnnnnnnnnnnnnnnnnnnnnnnnnnnnnnnnnnnnnnnnnnnnnnnnnnnnnnnnnnnnnnnnnnnnnnnnnnnnnnnnnnnnnnnnnnnnnnnnnnnnnnnnnnnnnnnnnnnnnnnnnnnnctactaactgctatcaaaagaagttaaataaaaaaataaagaaatcttataatcttatttgaaatattgaatatttgctgagatgttaacgtaagatatataaaaggtgttgaaccacattaagttaatatctttaatatttctaattgtgatattgtttatatatatgtttttatcatgtgaactcacgaaaagaaacatgctcagaaaagatagggtgtcatccaatacggatatggataaaactatttgtgatttaaggttgtaccatatagaaatttcatacccgaatttctattgacagttacaacatatgattagtgatgtgtcttattaaattggatgatgcattcctgtttttatcactttattataaaaaaatccaatatagatctaaattcctctgtggatattaatgaaaaaacaggtccttgactatttgggcaagtcctcgcgagggaaccttatttgttgaagcatgtattacatttttgtttgcttggaactataataacatatccgtagagagagtctcacaattgatttttaaagcggcatggcttcacgacaggttcactccattgctcaaagttggattagtgctacagttatgagggaaagccttaaaataaaggggtaagttacttgataggcatagggatagacgatttttggttctttaaaatataaataataaaacaaaataaaaacttataaaacctgaataataaccggtaaacaagtaactattttaaaaaataaaatgagatgaaccgatgaaagatactggtgaagaaaagagtgtgtttgagaatgtgactctaatattcttccttattttattgtagatgtatnnnnnnnnnnnnnnnnnnnnnnnnnnnnnnnnnnnnnnnnnnnnnnnnnnnnnnnnnnnnnnnnnnnnnnnnnnnnnnnnnnnnnnnnnnnnnnnnnnnnnnnnnnnnnnnnnnnnnnnnnnnnnnnnnnnnnnnnnnnnnnnnnnnnnnnnnnnnnnnnnnnnnnnnnnnnnnnnnnnnnnnnnnnnnnnnnnnnnnnnnnnnnnnnnnnnnnnnnnnnnnnnnnnnnnnnnnnnnnnnnnnnnnnnnnnnnnnnnnnnnnnnnnnnnnnnnnnnnnnnnnnnnnnnnnnnnnnnnnnnnnnnnnnnnnnnnnnnnnnnnnnnnnnnnnnnnnnnnnnnnnnnnnnnttttttttcatcttgtccttaaaaactaaacaaaggaacatttttttgcatcacttagtgcatcaattggaaacatttagctatttacgcgtaaatacagaataatcaatacgtaatattattagtactcgttcatattgaaataggatgccaaatttgtactgtcctacaccgtctgtaccattatatatagtagctgcatttattccatacaataaatacatataacatatttaatactaccttcgagtttttttattctcttacattacccttcgaaggaataatgcaatacatacatatacatatatatactttaactttcaccttgcgaccatttataatcttctgtaacctgaaaaaaaaaacgtgaaagacaagacatattaaacaatcccaacagacaacaacactgtgaatatgaatgcccagaatatttggtcatggtagtttagtaaattaaaggataaaatatcttttcagtccatatatatattttttaataaaacttgattttagttctcaaattttagttttaattaatttaattctcgaattttaaaaaaagacaataatttgttcctcctcagaataaaagtaatgatgaaaccataattatttttctaaggtttaaagattaatttgatcaaaatagaaatatggaaactaatactatacaaataaatatttatcgagaggacagagattaaaagtatgccttattaaggctagaccgacaccgaaagaggattaacactgatgggcttgaattcgaggacctccttggagttcaaccatgacctaacccacactttcgtttcatacacatttttggtttcaccatgttttgcttcctaagtgatgtagtatatgaacccttccaccacctgctgctttgcactaatcaccctcacaaactccagatttgcattctgcatttccaactccaatataatcaccacaagtataaaaatagagataaattaaattaaacatgcatatattaagatgttaattaattcttaagttgtaaagttgaaacttaaaaggaagaaaattaaagaaagaacctctttattgttgtattggtcaacagcaaaacgagcgagattctcgatctcgacgctgttggcagctccaggcacatcggtgatgccacctgttactggctcttttgtttctgttgccatttctcttttctttatcttctctacatcactaatattctacggctttttatagggaaatatcaatgtttgtcttatctcattctgattgaatttgagtggtaaacaaaaaaagatcaagagatcgaatgaaagatgaaagatttttattttatcttatgcaaatattgtttttgaggtaattatatgtcatgcattaaacgtggattcttattctaataagaatttgaactattattcgatccaatgttgtaaaagaatagtccattccattttacctaaatctaatatatatgaaaaatgttagtaatacattttaaatatgatttttttcctattgattgaaattcttttaaatttcaaaattttgtaaatcttaattacatcttatttaatgaatttatttatgattttggagcatttaataaattctaataataataataattaataattattattttgacatgaatatgttaaaaaactgttatgctagccttgatctccgctactgagtgtgtatatttaattactatttataacaattattcatgtacgttttttatgttttttattttaaaaaaaagcattttttttaactattgcatttgcatatgtgtgaccaatctcagatattccctttgtcaatatttaacaaaaagcatttttttttttaactattgcatttgcatttttttaacaaaaatttcatattctccgtacgtcgttttgtcgtgggtgtttcaatgaattactgcagaagaataagcgggagacaactaattaacttcaaccttgacatttttggatacttgtggacacaactcacccatgatttaagcacgtgtttggatgtgaagtgtgaactacgatattatgtctccattatgagttggttgtgaaactgtgaaagctggtacactatgtttggcagagatataatagatagaagaaacaagaaaatgaggatgatatggaataaaaaattaatgatggagtatatttgataaaagagaaataggtgaagagagaattaaaaagatatatatgaaattaacgatgactagaaatcgatagtaacttctccccctctctaatttgtatttctcttaaataaaatttatatttttcacttagttttcacctatttttcttttctcaatttttatcaactgtatttctctttaaaatttatctgtttctttcgtaaagatccggatgtatcctatttttatttttcttaaattaaatgtttttatttttacttagttttcacctatttttatttattatatttttcttctctccatttttatcaactgtatttctcatttcatgtatttgnnnnnnnnnnnnnnnnnnnnnnnnnnnnnnnnnnnnnnnnnnnnnnnnnnnnnnnnnnnnnnnnnnnnnnnnnnnnnnnnnnnnnnnnnnnnnnnnnnnnnnnnnnnnnnnnnnnnnnnnnnnnnnnnnnnnnnnnnnnnnnnnnnnnnnnnnnnnnnnnnnnnnnnnnnnnnnnnnnnnnnnnnnnnnnnnnnnnnnnnnnnnnnnnnnnnnnnnnnnnnnnnnnnnnnnnnnnnnnnnnnnnnnnnnnnnnnnnnnnnnnnnnnnnnnnnnnnnnnnnnnnnnnnnnnnnnnnnnnnnnnnnnnnnnnnnnnnnnnnnnnnnnnnnnnnnnnnnnnnnnnnnnnnnnnnnnnnnnnnnnnnnnnnnnnnnnnnnnnnnnnnnnnnnnnnnnnnnnnnnnnnnnnnnnnnnnnnnnnnnnnnnnnnnnnnnnnnnnnnnnnnnnnnnnnnnnnnnnnnnnnnnnnnnnnnnnnnnnnnnnnnnnnnnnnnnnnnnnnnnnnnnnnnnnnnnnnnnnnnnnnnnnnnnnnnnnnnnnnnnnnnnnnnnnnnnnnnnnnnnnnnnnnnnnnnnnnnnnnnnnnnnnnnnnnnnnnnnnnnnnnnnnnnnnnnnnnnnnnnnnnnnnnnnnnnnnnnnnnnnnnnnnnnnnnnnnnnnnnnnnnnnnnnnnnnnnnnnnnnnnnnnnnnnnnnnnnnnnnnnnnnnnnnnnnnnnnnnnnnnnnnnnnnnnnnnnnnnnnnnnnnnnnnnnnnnnnnnnnnnnnnnnnnnnnnnnnnnnagaccgattaaaaataataataaactgcaaaaaaaaaattacatattttctattgatctttggtttggtttttacatctaattgttgaaattgaacctaactgcacagttaatatgcttatattcataatacagaagtattttaaagttttgttcataatatttcttttgataggcacttttgttcataatagtatttgtagtgaacggtatcatcattcaaattaatttagatagtataatcaaattaaattaattttgaaaattagataatcaaattgaacccaaaaataataagaggattaaattaaactaattttaaaaattagaaaatcaaattaaatttaaagaattagagaaccaaataaaaagttaaaattaaattagtgacaaaaataattgaacctttttatttatttattgacaaatggtaacgcatttaattttaacaaataaaaattgataaatatttaggaccctgtccaaatccaaggagggcaagtacttcatgattgtgacctcataatcgcattgagtacagaaggcaccgcaccaccagatcattctgctataaagttcgaatcatcaccatccacacattggacgaaacacgcatgaattaatacataatcaattattttattaatttcgatggaaatatttatctgtagtaatttatactgaaataggatggcaaacatggacaaccccacaccgtttgtagagttaatagctacatttattcagttcatacatattatcactcttgcgcccaagctagagttacataatcttccttaacctgaaaaaaacaccaaaggcgcatttaataatccaaacagacaagaaatctaggcatgtgaagaccataatatttgaaatcaagaaatccatttttgtaatgtgaaatcgatcaaatactcattataatttttttatttagtcccttagtttcaaaaaaataaaaaaacatagacacatagtctatgcaaaattattttttcatagtctttaatttctaccattctatgattcgatcattaacttttcgtttgttttgtacggcaagtgtcatttttcttttcttttttatttgattcctttaaatatcaccagttttttctttctttctttcatggtaaaatatatacctagctatgtgctagaccgtcacggaacgaggattagcagcaacagtgatgggcttgaattcctgaacctccttgaagttcaaccatggtttctccaacaccttagtttcataaacctttttcgtcacaccatcatttgcctccaaagtgatatagtacaaggtgccagaaaccacttgtttctttgcactaatcaccctcacaaactccagaactgcattctgcgtttccatgcatattcaattaaatcataagaaattaaaaacaaaatagaaaactgaaataaaaacaaaaatatataaaactcagatatgtgcttttataaatgctattgtctaatcagaatttttattttaatacatcacataataaagttttgtattaaaaaatggcatgagttagtaagataaaatttcaatttataactaaaaaatactgctcaaaatatataaaaatgaattaaatttcattttttatacagatatggttataattatttgactagtttctctcgagaaagataaaataattcaaaggtcagatactcccttccaaagacaatttattttccatttaagatttaaatctctaattagttagttataatggaccaagtttaattcttacttatttgtgagacccctaatcataatcagaacaggattcaggaagtcaagtatcagagctacagaaagaaactaaacccactttggattctcaaatcacgtgatcatggaatgatccagtacaccaaattaacataaatcataatatcttaattaagtggtaactaaaagttgacttaaatgaagaaaagaaaaaataaaaataaaaagaacctcttttttgttgtgttcatcaacagcaaagcgagcgagattttcgatatcgatgctgttctgtgctccagcgatgtcggtaaagccacccagtgctgccatttatttctgtttttcttttgatctttctgtcttatgtttatctcttcccttctatgacttttttatatcgttgtggaagagtggtttttgattagttaaatgtggctgtgaaaatagagcctatgcgtgtcggattttcatttgttttttattattgcaaacgtgtcacgtgtgaccaattcaattctctccttatgtttttgtgcatgatccacgacttcaaagttcaaccttaattaatagttattaattaaattcttttcatatttatattgggaaaaaaaaataagaatagagattcacactcagaagccaacctttatctccaaatgagtctgtacgacagaaaatgtagtagtgctgcatatatatatgtaagtaggaaacaagcaattatacatgaacaactttaaccctgtaacttgttatgcaacaattacttgttttcaagcaatttcatctaaaagtactctcaagtctcaaccaacaaattagtcaaccagaaacggtgacatcagtgcttgaagttcctagtggcttgtgaatgaaagtacctagcttgcttgctgtatggtttgatgaaaatttcatttgaacgaactataagtaatcagcaatggcacatactttggaatttctagctgaaaacctggaaactgcttgaagacgattctgatatgtatcgaagcaaattgagaagcacactaaaattaagcaatattgaaagcctaaaaaacgtgtcagaacctgaagaagttcagacaatgttccaggtagaaaaccggcatggatcaattatttttcagttaaaaactcaaatgaacttcttatcagttaacaaacttcaacatatagtgatcattatttttcgccaaagtgatcaatgagacaagacacatgtcacttatgaagctaaaaagaagtgaaaccaaaaacttggtaaggtaaaaataaaaataaaaaagtgatggttcaagagctaggctcatcaggctatatggactggtctaggaaccaggagacctgtgccttcgctcaagtcccatagctcaactctcaacttggagcgggcaggccagcataatgcagccaccaacccagcctggctaagccagagccttgtcccaccaccttgacgcccccacttgggtcacaagctgacgctacgcagttgtcagaagatttataaaggcttggttgcctaatattctaaccaatgtgggacttatatggttagtctaatttggaatgtgggacttgattggattctctctaggctctagcaattttatccgtgttgtgttataacactaaccccaaaatattgctgtagaatgcaatggtttccacttacgtgtaaataatctttctctattaattgtgtgacacagtgacttgtgtccactagaaagtgaagagaaaaacatagaggtgcatcctacaaattcgaattgaattaactgattatgataatagttgagttggattgatcggtgggttcaggtattcctaagatcccaattaacttaaaagtaactactaattgatagtcattcattattttaaatgaacgcaacaaaaattttcgttgcttttataatgaacatgaacaagttattactaattgataattatttaataaattacaattccttattcgagtcacttcaaacataaaaattcaaactaacaactatgtaaaaattaacgtgagtaggcataggatgatgggagtttattcacccttgaagactgaatcagtgattcgggcactgcataacatgaaaaggagcaaagaagttgcaatacaccatgtatactatttaaggtgaggtgaatgacacagctctttagatgcttacaagttctagtctctaagtatgctttagatgttgccttaatacttttgacgaccaaactagtttcattttcctacaatgatgctatgatttaagtcatgttactttatggaatataaggctgaggacatctttattctatatgatagtgaatttgtgagaaattgtctttagtatttaagagttcctttagtagagtgaaaagaataaaatgaaagtaaattaagatgaaaattttgaattaaaacatataagtgtgtatcccatcttattgtttatttctttttctttttactttctttctcatctcattgtttatttattttccttttcactgtttttttcttttcttttcaaacgaacgaatctttagagagaaaaaacaatgggggtggagggatgagagggagggcaaaggagttggggtgggattaagtgaagagggtggttatgtgacaacaaacaatccatgtaaatgccataagttttgaattagataattaggttttaatttgaaaagagtttaattcttctagtataagaaaactttataattaaatatataatttagtcttatacgaattgtggaatttcaatgtgatttttatacataaaaatggattaaattcaaatatatttttaatttcttaaatttaataatacatttgacggagatgaccaaactaataatacttgcaatataaagattgatttattaaacgaaatttatatagagactaaattgagattacggcacataagaactaaattatgtatttgacctaaattctgtatttgatggtgtatatgctaacaattattctaaaaaattacaaaaaaaaaatcaaagacaaaaaatctgaacatattttaattttttattaatttttaaatactaaatattataaattcaaataataataaccaacatttttttttctttgcaaagaaaaaactgaaaattaatcttaaatatgtttatggttattatgctaatggtcacatagtctgatagtcatatgaaaaataataaaataattaaaataaaacaattaaaaaataaaaataaaaaaacctagaaagaacacgatcaatcggcattcaaaaagtctctctgactcttggcagcgcgaagccaggagcagcgtttctcatggcggttccaccatcggaaaccgaatccgtagagaacagaacactcctttcacagttttactctcactatctcggaaaccgaatccaggctctctatccctacttctccacaaatttcttctccaacttcgctctccgcttcagatcaacgcagcgtcgggaatgtctccctcttccactaccttcctcttcactcgactctcccgtgtaagttcattctcctttttcacttcctcaaattcaacgataaataaaataaacaaatgttcgtgtttgaatatcatttgtgattttatgattctaagctctgtttcttttgctacattgaacgaacgtatggatgaatattagggtttttgtgctgtgttcccttgtaggctcatgaccaagagatctagagtgcattatgttgtggaggatatattagagcgtgttttgataaatttgcacggcgtccaaaagaatctgcacttttggcagtccagagctaaggttctgtttttgcttttgttatctgtatatatgactttgtttggataaacttctctataagcactgaaaagaaagaaaataagaagaaaaatggaaatgagcttatgcgttagttaaaaataagcttcttggagaagctaatatatgagaaaagttttataaattagcttatgcagaagctaatttttgctcatggagaaacttgtttcgtttttacttcttattttcttttcttataagtatttatggaaaaaattatccaaacaggtagttcacactgtgtctgttcgggaaatagtcatactgcttatttgtttatcattcagaggtcggattccgagaaggcacgtttcatgatatttgagaggggtccaaaggcttttattgatgaaacagttaagttgttgtgtgggctcattgctcagggttcgtccacacagaatctgagccaatctgcatctgattatatcggcgagagagtaggctttttgggtagcttaagatattcactcgccacatttttggctcaggtatgctgtgttcaagttggctttttccttgtgtttgaatcacgactagtctttcataattagaatgaatataatttgcttgtctgttgttgtcaagcttactcaatagttaataatcctttgaattgtatgattccgtcacattgatgttattaatcttcatatttgtagaagagaaaaaatttggaatgaccaaatgattatgaaggtggtgttgtatcttgcatgttttcttagcagctgctgcttttcacccagttgacctagtttttctcttgggtactttcccattttttttttcttgctgtggcaccattattgatgtctttaggggaattccttgtatgggccttcagagggattatgaggataggtttgacaggatagttcagtcagcatagaatttaagctaagttatttacatgtagatgtggggttcaagttcatctggcatatcatatgattctgtaagtgtagacaaatattcatggtgaacagatgtaatgtacacttatgaactcacctgtagacatagaaaattataaatatgcaagactttctattcaacttaactttcttaagtgccaatgacatcaattttctgatattatttcaaatttgaaacttcttactcaggtttatatggaagttgataaaattggagaggagttagtgaaagatccagagactaagctgcccttgttgttggttacaattaatgttttgttttcaacattagaagcttcaattggacatctacatgcaatgcgtcaggtttatataaataaagttgtttgtttttgcctctgttttcccttatgtatactcttaccccttatctctatgtaccatggtttgtaaagcaaaactgaagcatgtttgcagcttaatattgtttctagaattgaccttttctatttattcagagtgattcttctgttgatgggagctattcaacccctctgctgtttgagaagttgccagaaataaatcaggcggggtctcagtggacagactgtgaaataagagatgctatcaattcagtttatcaaaatttagacaagttggattcatacatatcttttcttgtaagagcttctatattatgttatttgattaagttttggagactgtcactgtctaaatttttacctatatcatatggtctaatattcatgatatagcttctatattatgttattttcactgtcactgtctctatctcctgccaatctctgggactttgtcaatgcctattagaagtggacaaaattatcttgactggagtcaataacttgggcttctattttttgaccatatatattggatttagtcatttgtggatggaggttctgaaattgaacaattaatcaacttgttttaataatacatatttgtttctagttgtccagcttatgttgattggtttgttaagtaatatcattaaaattttaagtttcaattttatggttgtaatatgtttcaggtcatcaaacataaaaagccaaggaaaataactcaatattggatccgctatacatgtggtgcagttggtttgtcagtatgctccatttggctcttgcggcatagtagattggtggggagttctgatcttgataattgggttgaggaagctaggaactcaacatatagcttttttaagaatcacgtagaggaaccggtacatttcttcttgataatttactatggtttcactcttttttctttttttttttcccctcctcaatataggagaaattaacttaacatatccttatgagataggtgtgatcagcattattcaattttcttaacctcatttcccttaaatctcgatctataataattagaattaactatgtacccttcgtaaaagtctgttctccatgagcaatgaagaaatttcattttcttctatcttctccctcttcattcccatttttaaatctgttgaaagtgaaccaaactgattaaggtttacaaattgatgtaggatggaagcatgaaataaggtttaatattgtctagaagctgatctaaagtgcaatatgcctctatgtaatatgtatataaggttggattcccccagaaaaaaaaggaaagttcttagaatgtattataaagctaggaagagtgttgtttgttgttttaaaattaagcctagcccttaaattattctattctattcaatatcccactagtactcgtttgactgggttaaatccatcagttgaaacttgaaaccaaataaaaccctttaaagtaatctctataaaaattacataaaaatcttatgtactattgagatatgagtcctcttgcttgtcactttgtcctgcgtcataattgtacttttgtaagtattctgatgcaatcatttttcagattttgtccattagggatgaactttttgatacattcaagaagagacatcaaggtattatggacgttgaagaggtgcagttaacttccaactcactacacaggttattggtttttacatacgttgtccgcctttttttatttttgaatactaaacctgaatgaaccttaatgctcagaatgtttaattttttttatcattacaaaatgtttaatttaacataactatttacagttttgcaatatatgctgttaattaggcaccttaataattgcttgtgaaacttttgggacttgaaaattttagtgagttgtgttgactctcttccatggcttgaattgaagctgattctgtacgtagaagatctaatttgaaaagaaataggaaaaaaaatcaactaatagaagctgtgcggtaaatgcaggatgttaatttttctaatcctgttgattcagtgtagtctggttacctactattatcttttacaatgttttctagcatatgctaataccataagtagaagtacaatccagtaccacctaaatctgtctgaagaatttggatttattagcaacaagataaaatattaaaatatgcttagcagttagcagtaaggatatattagagatatctagtcttcatactatgaattatttcattttttttatgactacctgtaattgcatttactcatattcatggatattgctttaagcttgattgacgatactcatctacttgaaattgaaaggcatgcttgttgcatggataattggatattgctttcgttgtaactttttctaaaaatttctgtacagaatgttgttggctttcagtgagcagacaaagggtcagaagttcccagtgaatgcttcagatcaggaaatgatggagatagtcatggataggtgagtttggatatttcactttagaaccatctctagttatacttgtcttatggtagtaactagtaaggtacttatggaattgaatttgaaatagatacatggatttgcttgtgagccattttccttcatattatacctgtagggttcattatatgttggtaatagcttggttgttttctggatttagtactaaaatagttctcaatgccaatgacttctggggaatgaagacaatgctctatagaatttctagctattcttctcgctttgatgtttcatcatgaagatgtgttatttttaatagaaagccattggtttgatattgacattaaatgagtgtactgctgtatcttttgactaaggggtttctggcctatgttgtgggttaactattctagtttaactagcggtatcttttggggttggaaatatgtgagcatttatagtcaaataattttaagataatgggtttttcattttttaagttgcccttctgatattggatgtccatgttagaacaatctaaattccttacctggatattcatataaaatattttcaatttacattgattgacaatattcaaaactttacagaattaaaaattggattttgatggaacaaaaggacaataacatacagaaagtgttttttatatatattagtcctctctatattatctgatagggacttgggtattatggggtgcctatgtcccacattgagtagtatggatgcttggtggagtactttaagtgacttggcctccaccccccactgtaagggggttctccaagtgcttgggtgcttatcaattggtattaaagctggctgtcaactcgagaagggctatctacgaggacttcggctctcgagggcagtgctaagataaggacttgggtattatgtggtgcctaagtctcacattgagtagtatgggatgtttggtgtagtacacatgtggcttggttctccctccttgactgctagcttttaagagacggttccccaagtgcttaggggcttatcattttctaatatcaagaattattgaatttagaatctttattagtaaaattcataatatcacttcatttcttgtaattttagtgtttatcacaattgttaagatctaattttttcaagtataaatgcaggtatgagaaggaactcatgcatcctattcaaaaccttctcaatggagagctggttcgggctatacttattcaggtaatataattcatatgttatatcttatatgtaacatctggtttagtagttttaacgtaacttttcactgttccaggttcagaagctcaagctagacactgagacgtgagtttttttaatctgaaaatttaagtaaatatttcacattgttttaattcctcaagataatattttggtcagggcaatgctagagctgaaccagattctacgggcaaatgaaatcaactttgcagttctgactgctttacctgcatttttcctctctcttttactcatgatgttagtgcgtggatggttcaaacaggtaatttcccttggttggttggcacaaaatgatgagcttaaagaagatagtactccaaatatcatactatagtattgaactcttgagaaaaactatatcaactgagttggagtgtgaatcttgtttgaagtgacaccctactccatgaagtgattaagtgaatattggtgacaagattgttgggaaagaaaagagaggggggggttttggggggggggnnnnnnnnnnnnnnnnnnnnnnnnnnnnnnnnnnnnnnnnnnnnnnnnnnnnnnnnnnnnnnnnnnnnnnnnnnnnnnnnnnnnnnnnnnnnnnnnnnnnnnnnnnnnnnnnnnnnnnnnnnnnnnnnnnnnnnnnnnnnnnnnnnnnnnnnnnnnnnnnnnnnnnnnnnnnnnnnnnnnnnnnnnnnnnnnnnnnnnnnnnnnnnnnnnnnnnnnnnnnnnnnnnnnnnnnnnnnnnnnnnnnnnnnnnnnnnnnnnnnnnnnnnnnnnnnnnnnnnnnnnnnnnnnnnnnnnnnnnnnnnnnnnnnnnnnnnnnnnnnnnnnnnnnnnnnnnnnnnnnnnnnnnnnnnnnnnnnnnnnnnnnnnnnnnnnnnnnnnnnnnnnnnnnnnnnnnnnnnnnnnnnnnnnnnnnnnnnnnnnnnnnnnnnnnnnnnnnnnnnnnnnnnnnnnnnnnnnnnnnnnnnnnnnnnnnnnnnnnnnnnnnnnnnnnnnnnnnnnnnnnnnnnnnnnnnnnnnnnnnnnnnnnnnnnnnnnnnnnnnnnnnnnnnnnnnnnnnnnnnnnnnnnnnnnnnnnnnnnnnnnnnnnnnnnnnnnnngcttgcaagttacagtatgtatatattgctaaatcttaatctcttcactcctgactaatttttagtgtatgtgtagggatactgttaaaatttgtttatatgtgatagtggactagatattacatcacctgtttctagttacttatgtcttaactattatttgttaggtaaaaagatgttttttgataccaaatctgctcaatttcatcctttatttctttgtccactaatgttatacttgactgttatcattttttttgtatagaattttgttatttgcctcgtattgattggtggatgctacacagtgttatgaagttacctattctgttttcaatggatttggttactcattatagtttagtgagataatttccaatgattttctaaagtaagttggcttggatttagcatggacagaacttagatacaattccttaggtgttgtttgtgatattctccaattagaattggagttttaccacggtaaattgtttctttttttttgtcaacttgtatcagtaccactacttacattgataaaaaaaaaaaaatctgtgtaaattaggataccaaagctgagggaagaggtagagttgctcggattcagaggaggctacttgttatagaggttaagaaaaggattatgcagtaccaaaattatgttgatcaagggttggtaagtagctttcctttttgttgattttatttagttgatttgaatgagatagatagaccaaggatagaaatgtcgtgttacatgttatctacaggagagagatgcacaatatatgtttggattggcactctatagcctggatcgcctgtatcagtctgtcaagtggcacgcagaagctaccggagagtgggaacggttagttgcactcttctctctcaattctcagctacaattgtctagttactttctgtttaacaggctcatatttatatcctcttactgtttaagcacatgaaaagaatgtgatttttttgaatgttgagattgctaaatcagtgtaattatgaacagtttgcgtgaggatataatagatttggctaagcctagactacaaactgcacacaaggaatctgtgatatcacacatggttacatttgactgcttgcttccaagtcggaaccgccagtagcatcttttagcttactattcttaattcttttcaatgatgtttctcttgctactttgaaatccaattttgttgcgaatgtatacatatattcctcgtacatggttacattttatcatcatattatgataacttttgacaattttatcaattgaatacaaatgatttatgaagggataatatatcttcatttgctcgcaaaagtaacttaggattaaaggtaatgttgatgttgatcttcttgctcatgaaagtaagtactctagataacattctcatctccgtttttggctactagtgcaagtctctggttattttttgattggtgttcaatccttttccgtcacaactcagggaaggcagaattgaacatttgtttttttttttttttttttttttttttgggcgggggatgattaaaattcatcagacaaagttatatattagtattacttttatacaaaatattaataatgttaggtcatgtggttatcagttcatcagttatattgttatttgatatagtagagactaaaaactgttaacaaaatattacataagaacaaaaaatgttaaaaatttaatatgaaaattaacgatagaagaaagaatgtttgcttgtttcataattcaagttatcaattgataatcatttaatcacaaatgtaataactagcaaattttagaatagaaataaaggattnnnnnnnnnnnnnnnnnnnnnnnnnnnnnnnnnnnnnnnnnnnnnnnnnnnnnnnnnnnnnnnnnnnnnnnnnnnnnnnnnnnnnnnnnnnnnnnnnnnnnnnnnaaagaaaaaattattaaatgatactcaaataaaaaaaaagaaaaatgtaatatcttcacaataaaatttataaaaaaaggaaataaaatatttgtattaaaaaataacgtttttttctttacaacaaaaacatataaagataattgattattttaaaaattaaataaaaacaaaaacatttaaatatcattatttttaattaaattttaaaaatagtatctaaaatttaaaataacatgtatattataaaaaaaaactaaaaaaaattaacctacaagtaacctcattagattatttataacgtattttttgtgccttttgtggagctataagtgtatgcaacaaattgtgtttagagttggacaacaattgaatatgatgcttgcccgtatcttgtccatgtcttttcacagtcttctgatcaaatcacgtgcgtgactgtatctttccatacaagcttaaagcaattaagaaagaaatttaaagaaaactgctttaatttctaattacaatcgataccatacgtttctcgacaatttatttaaattactttcaaatatttactttttgattttcttatcccgacaagaaatgaaaaataaatttaaagggaccgatattaattaagaggcagatacaactacacgcacatatcagtaatgtaaaatattgtttgttgtgcatgcgattataacaaaagagaaaaactagaagaaaaaaattcctttgtcaaagaaaaaaagaagcctcaagtatctactgtttgtgacacaagactatcttttccctacgataaaaaaaaatagtgtcaataatttttggaactatctcttatttaaactgatgtgaactacaaagcgtggaaaattgagtgcgagaataattaaggtttcttttctattttaggagtgataagtttttagtctcaatttttttcagattttaattttcagtccttcaaatttttttggaaatttttaatccctctaattttattttttttcttattttaagttccttgtttatttttagtccctcatttattttatattagagactaattttacgtaataaaaataaatgagggattacaaatgaataaaaaatttacaaggattaaaagtgatgacaaaaaattaatggaagactaaaatttatcaaaaaaaaattaagggctaaaaattggaagctaaaaaccttcagggactaaaaatttaattaatccttaattttattgcacatctcgaagctaatttcttataagtagtttacaaatgcttcattaatataatattattaaatttaatgaataaaaaacaaaaatagttttaatgaaaaaggtaaatataattatattattaactaatcttttgtagtgtttgttttgcccctggaaggatgaaggagaggaagaggagaatggaaatgtaatgtttattaaggaatattgaacccctaagcgaatacttaaacacaaaacttccaatttaaaaacaataatagttgttcccccataaaccaagggtcaaaatcatctaacaagatgtttaacatgttcatcaagtatacatcttgcacctaaagattttaattcaaatttatttatatttatgtgtgctacattgttgatatcagaatatttcggttcaactatttttttctttaattttttaagaagctaagctcaatgagtgaattattcaatctaacatctttccaagagcgttgttaacaaaacttttgcatattaaaacggggttcaaaaggggtgttgctcagtgctcaccctctccagagttaacaccacctagtaataatagcattcaccacaaaagtttaaaagatagaattagtacagagatatatagaaattcatagaataactaagtagactgctttattttatttcttgcgggcaacatagataagatttattacttattataggaccagtctacatatagcaaccatattcaccaagaaacaaaatctcacgctactacttattgcccttgtgttcagcatgcagaccatcaaagtaaccctgaggatttttctcaaattccttcctcgaaatataagatccatctccacctggagccttcataaccttatcttcagaaccacttccaacattgtctttgggtttggggacttcacctttgctaacttcaccactagctttcctatccatgattcaaacttatcacaatagtagagatataatgcacaataaagcttaaaaaaggtttcaagttactattagctaggatatgactgaaagctagagctggctggctatttatacaaagaaaaatggtgaatttatttttcgtgaattgctgatattaaattcctttattcgtttccaaaacgtgcatttgattcatgcataagaccaagaaaaatattaaagcatgcatttgactgatgcttcaattttcaattatatttcacacctttcatgcgaccaattgttgttaattcttactattcttatgccatttatattcacctttttcacttcaaaactagtggtagctttgtaattatttagaaataaaataaataaagcatgcttatataaaaaaaatagtaaataaagcatgcattttcatttacttaagtgttaattgtcacttatatagtggtgagaagatttgggtattttaaagaaaaagattcgcatatttacaagttacaggtgaattaacattaattatatatttttttaattataattattatcaattgtgttatataattattaaatagtatatacagcatagaaaaacatagaaagacaactaattagtgttttcccctatattaagtgccctaataaaagaaagttgaagtttgaaaaaaaaatggtctggtagtagtattattcaaattaatgaaaaagtcccaattaatccattccgtggatgtaaataacattaacgagaagatgatttagatcaacggtataaccacaaccttcggctttaggtttgacatggcagttttacttacaattattgtatagttgttttaatatttcttgtttcgattacagatgaaacaagctatgaaaaaaccgttattagttatgatttgttatgacaatgttccaatattatgatgctaagaaattagtctgtcacaactgacaccaaatgtagctagccaccacaaaggagcaacatataaaaagactttgtgtcaatagcttcatttgtgattctgatttgctaataactattatcattcattgcattcgagctagctactgtatcttgatcaataacatccatcatggggacaaacgagaccctattgagcataagcagaacaattttcagtaatgctacgttcgacaactataattcagacccagacagaaaatttatttactataatatttccattgacatgccatccaagatagtatccgatggcatatggggtaacccaaattatggcgctttactttcaagatccacaataccggtgttggagcttcaaattctcaccattttcgttatcacgcaatgctttcattttgtgcttaggcgccttggcttcccttatttcgtttcacaaatgatggtacgtacatacatacatacatatatatatatatatatatatatatgctttgtcccttctccaatctttgttactgcatgcaggtctcatacaagaacatgacatattgcacatcatgttaattacacagaaaaacactattatctaatagcataggcatgcatgcatgacattgttatatatgttcttaaggaaaaccatataatatcaatccatattatatatatgtgaagtaataaacactcatttattttaaacactccatcaacacctctcatttctttatatttatttctttctaaaacatcataaattctattatatctatatttttttgtctgtctcacagtacaatagatgtccatgaaacaatttccatatagatataggattaaacttaggaataaataaattagataaacgttggggtagcatatataacaattttaagataaatatttatttaattccatagattcctgagatgaaacttcaattcattttacgtgtttaccgaaataaaattatttgtaaccaagtatgcaatatatatgtaaattaatttccaaatgaattggtgcatatgcaggctgggtttgttctaggcccttctctgaagatagaagcattgaccaaattcaaagtgatattgttcccttacgggagtgaagacgtattgaacctagtaacagggattgggtacttattcttcctgttcctaaatggggtgacgatggatttcagcatgataacaaaaactgggaagaaagcttggacaatcgctctttcgtcccttatgattcccactttcattggtctcttggtatgctacagtttcatggggtacttgcaacaagccctaggagagttcgatggaggaaaacttccggtgatagtaatagggcacagtggttgttccttccctgtggtagcttctctcctctctgatcttgagatattgaactctgaacttggacgcttagcactctcatcagcactttccatggatgtgataaccgaagttatgaggggatttggcgctgctgttgtgagtagccttaaactcgattctcacgataaaggtgaaggaaagggacctgaacttgcactcatcacatccataaaatatgttgttttcatgacacttacgattgtgattgcacgccccgcaatgaggtggattgtgaggactaccccagaaggaagacctgtgaagaaaacatatacatcatgttggagatatagagagataatggaaaatatttgaggaaaaactctttgtatttaaattgactaaacacaatacaacaatacactcaactttcaatctcacaatcactctctcaaattattttgtaatacaacaacaaaacacacacaaacttacttccactctaggtgcttcagcattcaacaaacaaacactctctttctattttttctctctacaaatctccactcttctctcttttctaattaagtgctactgcacttcctttcaatttttcctctctgctttttttctctcttttttttcttatattttttcaaatgaaactactcctatatatagctacaaaatgaggtgtgaaatggtgcaaaattcagccaacttttacggctcattttggtggctacaaaattcaatataggctgccactcttttcaacaattcacgtagctgccaacttttctttcatcacatgcattctaaaagcaagtcaaaaaggatggcttctagagagtttgaattctaacannnnnnnnnnnnnnnnnnnnnnnnnnnnnnnnnnnnnnnnnnnnnnnnnnnnnnnnnnnnnnnnnnnnnnnnnnnnnnnnnnnnnnnnnnnnnnnnnnnnnnnnnnnnnnnnnnnnnnnnnnnnnnnnnnnnnnnnnnnnnnnnnnnnnnnnnnnnnnnnnnnnnnnnnnnnnnnnnnnnnnnnnnnnnnnnnnnnnnnnnnnnnnnnnnnnnnnnnnnnnnnnnnnnnnnnnnnnnnnnnnnnnnnnnnnnnnnnnnnnnnnnnnnnnnnnnnnnnnnnnnnnnnnnnnnnnnnnnnnnnnnnnnnnnnnnnnnnnnnnnnnnnnnnnnnnnnnnnnnnnnnnnnnnnnnnnnnnnnnnnnnnnnnnnnnnnnnnnnnnnnnnnnnnnnnnnnnnnnnnnnnnnnnnnnnnnnnnnnnnnnnnnnnnnnnnnnnnnnnnnnnnnnnnnnnnnnnnnnnnnnnnnnnnnnnnnnnnnnnnnnnnnnnnnnnnnnnnnnnnnnnnnnnnnnnnnnnnnnnnnnnnnnnnnnnnnnnnnnnnnnnnnnnnnnnnnnnnnnnnnnnnnnnnnnnnnnnnnnnnnnnnnnnnnnnnnnnnnnnnnnnnnnnnnnnnnnnnnnnnnnnnnnnnnnnnnnnnnnnnnnnnnnnnnnnnnnnnnnnnnnnnnnnnnnnnnnnnnnnnnnnnnnnnnnnnnnnnnnnnnnnnnnnnnnnnnnnnnnnnnnnnnnnnnnnnnnnnnnnnnnnnnnnnnnnnnnnnnnnnnnnnnnnnnnnnnnnnnnnnnnnnnnnnnnnnnnnnnnnnnnnnnnnnnnnnnnnnnnnnnnnnnnnnnnnnnnnnnnnnnnnnnnnnnnnnnnnnnnnnnnnnnnnnnnnnnnnnnnnnnnnnnnnnnnnnnnnnnnnnnnnnnnnnnnnnnnnnnnnnnnnnnnnnnnnnnnnnnnnnnnnnnnnnnnnnnnnnnnnnnnnnnnnnnnnnnnnnnnnnnnnnnnnnnnnnnnnnnnnnnnnnnnnnnnnnnnnnnnnnnnnnnnnnnnnnnnnnnnnnnnnnnnnnnnnnnnnnnnnnnnnnnnnnnnnnnnnnnnnnnnnnnnnnnnnnnnnnnnnnnnnnnnnnnnnnnnnnnnnnnnnnnnnnnnttctccacctttccttcttgattggtctttgtcttgtacacccactttacaccaatgggcttgtgacctttaggcatggttgtgagctcccatgtgtcattccttctgattgcagcaatttcatcattcatggctttcttccacttttcatcttctgctgcttcttcatacgtcactggatcacattcagccattaaacaaaataatgaataatcaagtgtagtctgtaccagatctgtagcatcatagatatcacttaagcttttcatctttgctggtgctccccttgaattgctgctgctgctattacttcctgatgttgatggtgtagctattggagttgttggaataggacttggtggaggagtttgatcatttcctccttcatctatttgctcctttgagtcatcatcctctttgaaaaataggccttccaccttcttttgttcatcactccatctccagtaatttgcttcatcaaactgtacatctcgtgaaatgatcgcctttttggttagaggattgtagagtctgtatgctttacttttgaggtcgtagccagtgaaaatgcatttctcccctttatcatctagcttctttctcctttgatctggaatgtgtgcatatgctatagaaccaaaaattcttagatggcttacttctggtttcttaccactccatgcttcatttggagtcttgtactgcacgctctttgttggacaccggtttagtagataggcagcacattgaactgcttcagcccaaaatgtttttggcagatgcttctcttttagcatactcctcgccatatcaagaattgtgcgattctttctttctgcaataccattttgttgtggagtgtaggcagctgtcaactgatgtattatcccatgttgcctgcaaaattcatcaaataatttggaagtatattcacctcctctatctgttctcaatgtcttcagatattgaccgctttgcttttctgccattgctttgaattccttgaatttgtcaagggcttgtgatttttctttgattatatacacccaggcttttctgctgaaatcatcaataaatgtgatatagtacctgtttcctccaagtgatggaatgtcaaatggacctgcaatatctgagtgaactagctgcaatggtcttctagctctccatgatttgcctacttcaaaactttgtctgtgctgctttcctttcatgcagctttcacacaattgatctggatgatttattagtggcaatccgctcaccatatttgcctttgacaacagcttcagtccagtgaatccaagatgaccaaatctgtggtgccacaaccacgaactatcctttgtaatggacttcatgcactttattgcttgcgtctggatattcagcttgaagaggcggtttcttgtcatatcaactttcgcaatcaactctcccttttgatttcttattacaagagagttatctttcaagtgtatatcatatcccttctccagaagctgaccaatactgagaagattgcttttcaaagatggaatgtaatagacatctgagatatatgccttacctccattttttttaaaaatcatgatttttcctttgcctttgactggaacctttgatagatctccaaaagagacttctccatgaacttcttcatttagctccgtgaataactcctttttaccgcacatgtgattgcttgctcctgtgtcaaggtaccagacatccttgctactatcttcatcacctttgtatgtgaacaacatggcttgtccatctgctttgtcgtcatttgtagtataatgacttctctccgcaactttagcagcatctctacattcatagctgagatgaccatatctattacaattataacactgcaagtgagatttatcacctctttgaaatcttcctcctcctcgagtcatgaaaccacgtcctcggccacgattaaatgatccttgaccacgtccatatgttgttggatcggtctgaaatcttctattcgcttgggcatatccaccacgtccacctcgagtgttgaatccacctcgggtgttatagcttcctctatatcctccatgatttcctctggcaggtacaaaactgctcctggcttggtttccgtcaagagacaacttagtctgcatagcttgctccatactgctagagcctttattcatcatcattctttgctcgtgagcttgaagagaacccacaagctcatcaatagacataactgtcaagtctttggcttcttcaatggcagtgacaatataatcaaatcttcttgttaatgagcgtaataccttctccattattctgacatcatctagagcttctccatttcttttcatctccttggccaccttctgcactcgtgaggcatagtctgtgactgcctctccactttgcatcttcaagttctcaaactcggctcttagtgactggagccgcacccttttggctttgtcagctccttggcaggatttctgcaagatctcccatgcttcactggatgattttgcttcagaaattttttcaaatgttgattcatcaacaccttgaaaaattaaaaatagggccttcttatccttcttacgtgattctttaagtgtccttctctgtgcatccgtcatggctgcttcagcggctgcatctgcaggctctgagtatccggtttcaacaagctcccaaacatcttgggaacccaggagtgtcttcatgtgagtactccagtttccataatttgactttgtcaactttggaatttgaggttgaaacatctctgtcatctttgatcaacctagctctgataccacttgttggagatatagagagataatggaaaatatttgaggaaaaactctttgtatttaaattgactaaacacaatacaacaatacactcaactttcaatctcacaatcactctctcaaattattttgtaatacaacaacaaaacacacacaaacttacttccactctaggtgcttcagcattcaacaaacaaacactctctttctattttttctctctacaaatctccactcttctctcttttctaattaagtgctactgcacttcctttcaatttttcctctctgctttttttctctcttttttttcttatattttttcaaatgaaactactcctatatatagctacaaaatgaggtgtgaaatggtgcaaaattcagccaacttttacggctcattttggtggctacaaaattcaatataggctgccactcttttcaacaattcacgtagctgccaacttttctttcatcacatgcattctaaaagcaagtcaaaaaggatggcttctagagagtttgaattctaacacatcaatggtgattctcatgaccatattcgtagggttgtttggagtttgggctaaccagacagtgttaggtgggattttactcgttggtcttcttgtgccagaaggtcctccattgggctctgaattggtgaagcagcttgagatgttcaactcatggttccttgttccaatctttgtcacgtgttgtgccatgaaggtcgatgtttccacgcctattagttcccagttggttctcgttgtggttaccattgttgttgttgtgcatttggttaagatgcttataactgttgggatttgccgctattgcaacatgcccaaaacggatggtttctgcctcgctctcttgttgagctgcaaaggtgtcgtcgactttgtcaacgacgtctttctctttgattcatttgtacgtaaactcccttcactctctttttattttcaactattttccttaatttttaaaaaatgcacgcatgttatatatttgtacaatcattataccataattaatactcattaaattaaccaatgatcaggtgatgccgattgttttgatctcgatgaatcttcacataacacattttcaaattactatatgtattatgtggaaattggccaagaccatgtattcttgaattgaacaagtaaatttttctttcttaggactaatatatatgacaaaaaataggtaaacaaaacatatttaaccagctataaaagttatctaattttagttctaatgcaatgcagttaatgagcaaagaaacaatctccatgatggctatatcagtgttggtgttgggaagcattgcacgcattggggtgaaatccttatacgacccagcaaggaaatacgcagggtatcagaaaaggaacatactgaacttgaaacccaattcagagcttcgggttgttgcatgcatccacaaaccaagccacataaatttcgtaaaaaatgttcttgacatttgttgccccacaacagcgaaccccttagtggttcacgtcttgcatctgatggagttagttggtagatcctctcccatcttcatctcacaccgtctccaagaaaggcttagctcaggccacaactactctgaagatatcattgtaacattcgacctctttgaacatgacaatgctggcactgcatcagttagcacctacacagccatatctccactacgtttcatgcatgatgatatttgttaccttgcattggacaaactcgcttccatcatcttacttccatttcacataagatggggtgaggatggcgctgttgaatcaactgatgaaaacatgagaactctcaactctaaggtccttgaaagagcaccatgctccgtggggattctcgtgaaccgatgctcttcttcttctactcatcacagccctttaatgaagcaaatagcaatgatctttttggggggtgcagatgatagagaggcactgtgcttggctaagagaaccatcaaagattgtgattgtaacttggttgtgtaccacttagtttctagccaaagtgaggcaaattggaacctcatgctcgatgatgaggtgttgaagagtgttaagggctattatggtactattgagaatgtgtcatacgaaaaggtttctattgagcaaccttctgagaccaatgcttttgtgtcggatattgcaaatcgtcatgtttttttcatagttgggagacgtaatgggatcaaatcgccacagacaacagcacttgaaagttggacagagttttttgagttgggtgtgattggagatttgcttgcttcctctgataccaatactaatgcttcaattctagttgtgcagcaacaacaaatgcccaagtcgtcgtgaccaaagagatacatatactgtaaccagaaacttaattactgattcttttcatagacaaaaggattttaatgttgtagctcaattttgtaagtatcagcaaaagaaaattttcatacaacacttctgtaaatttcttctgatctcagtcagtcctttcatgcatataacactttttaatagtgattgattggttttaatgggttagtattaattgggtttaaatatgtttttatgtaagtttagtgtttttacatttttttttattatcttgaaagtccatttttctaattataatacctatacgtttgcatctttttaatttttgttgtcgtaagtgcgaacttataaggattatatgtaacatttcgggtgcttgacgagaacagggagtgatcgtcggtgtaatgaggcacggacaaggagcggctcctgacaggcttccagcaggaggggtacatgaatgaatcgaatacatactcgaacgagaggggatccagaagctgtgcaggtatgagattatacagttgatgataacttaaaaggcctaggaaataatagatactacctataccaacaaggtgcatctatttttcggtagtccataacttaagaacttcacaattaagtgtgcttgacttggagcaattcttggatgggtgacctcctaggaagtttcttaagaagtgtgtaaatgaggacaaagtacgctgaaaagtcttgtattggtatgtggggatattaatttttattgtgaaatatgcatcaattttattgattattaatttttaattgaagaattcaacttatcacttttaataaatatgtcctcttaatcatatttttttcaagtcaaggctcgagttgatacttaagagatcctagccacaaaccaatgacatgtagagtttttatttttaaagaaaattataataaattaaatttaaaaaactaaataagagaatttatatttaattaaaaaattaattgagatggtgtgattattaaaaatagagtgatggtttttgtacaactcagtttttcatatacttcattggcaaacatttttaacggactctaaatgaccccattactaaaaattaagaatattttaattttcaaaaaattaaatgattattttaaaattaaaattatagtattaaaaatattgactattagtatattatataaattcctaacatgatatttataattaattaattttagaatatacatctataatatttatttatttatttatttattttgagactaattaaagtcaagaagtttttttattaaagactataatcaaaatccaaagatatttcagaggaaaaaaaacatatgtaaatctaaaagtcttaatgaattactgaacaacctcgtcctaatggtacaaattaagattcacgggtgtttatagaaaactaggaaaaagaaaataagaatagatcgggaaagcaatccaagtgtagattagtataatttgaaaacgtagcatttccaataaggaatcttttaaggagatcttaacattaagatgaataagatttattattggagtaagatgttggatttatgtatgaagatgtaatttttgtaaaagaattattaagatttgtatttatttatgctattcatattttatgtttatattatttgtgttggtcagcattatgttgcatataatattgtcgatcttacaactgttttataaaattttctttttagcttaagaaaaattttacgatcaaaattttaaaataagatctactattagaataaaaatatattctaaaaaaatgattcaagatctcaaaataagatctattattataataacaaataaaaaagatcttgagagtgatgtgatacattaaaatctacaaaaaaaatgttaaggtcccaaaatgaaatcttctataagagatactcaatcaatttagagtaaattcaaaataagcatccaaaaaagacatatatatgataaaaatctaattaaccagaacaacttcctaatcatgttgtttttactggaaatcatttaacttgtagccaattagtaaattcaacaaataacttataattatttataaatagaaataaaaagaaaaggagaaaaaagaaaaaaatggggagggatagatatacccaaaatatttttttaattaatatatagggtatatatgaagagaacaataaattatcattcatcgtctttgcacttccgatcaccaaattaaaacatcttatttactttgtttttctcaaacatcattcatgaaaccatatatcacactagattgccagaataccagtccatcacatcatcattaattaaactaaaatccaaaaccataacaacaaaacaaggaaataaaagcaggtccatagaaaatgcatattatagtcttcaagctccactggtagaaggatgagaagagcatccacaaatgaattgagtatgttcttcccttctgtaaaaactcctgtggcagccacatgcagcacaaatcagacctgcatcagtaccttcggatccgcttggtatgaactctgtgcagccatccacagcatgtccttcaagatgcacacatgattcctttagcgctcgcgatatctcacatgcctcacaattgtcactaatgcgttgttttggcatctttgaggcccatttcttcccatgagaaccatccttctcatggtatgctatcctccaaaccctgcaaagttgtcaaaattaactgttagtggataatcaaaattgtagccttgaaatcataaataaacagatagagagagagaaatagagagatgattaagagagaaaggcagtgagagagtacagtttattgtgtaaggggtatgaagagccctaaccctagaagttatatttaaattgactaagtccgagctgtgccaattttgaattgtaagtaaatgacaaaagaacatctcagaaccattcaatgtaatattttatttctttggacatggaaacggtagaattttatatttttcttatgtttttcattaaagccggaccagttagaggattgattcttaagttcgcttgtatgaaagaaagaaatatatagagaaagttaaccttttaaatagatgttaatatttcaagaaattagtttttacctatggtcagaaataccttggttgattaaaacatatttagtgatattttttttttcacatacacgaatttcaagatcaaactaatgaatatttttaaagaatttaaataaatttcatttggacccacacagtttaataaatggtaaaaaaaattaccatttattaattttacaattacttcatctattttttgttggtttccaaatttttaaaaggtaaaaaaaatcaaatatatataatgaaaagataaattaagttttcaacattcatcggataaatgtaagagttattgaatcaaataattaattataagattttaactttatataaaatggtagttgatttatgattttctattgaaattttttatataatttttttatataatcatcttcaagtgaaatctattcttctaattacattgttttggaacttgaacatgaaatcttgtttaaaaaattagagttttacttcattcaaaccaacaatcacatgttcatcttaccttgaatatttttagtttttaggttaatcaataacgctaatgtatgtttttattcaaagttacaacatatatatttaaactaaggtaattaacaatattcatgatttaaacattcaatcattcaattttattaaatatttaatttaattaagctaattataactaatatatattttgattcaaattaattgataacattaacatatattttgactcaaagttacaacatattgaattaaggtattaacaatatttttatttgaacattcctcatacaatttaacactcaatcatttttttaatatttattattatcaatgctttttttttttnnnnnnnnnnnnnnnnnnnnnnnnnnnnnnnnnnnnnnnnnnnnnnnnnnnnnnnnnnnnnnnnnnnnnnnnnnnnnnnnnnnnnnnnnnnnnnnnnnnnnnnnnnnnnnnnnnnnnnnnnnnnnnnnnnnnnnnnnnnnnnnnnnnnnnnnnnnnnnnnnnnnnnnnnnnnnnnnnnnnnnnnnnnnnnnnnnnnnnnnnnnnnnnnnnnnnnnnnnnnnnnnnnnnnnnnnnnnnnnnnnnnnnnnnnnnnnnnnnnnnnnnnnnnnnnnnnnnnnnnnnnnnnnnnnnnnnnnnnnnnnnnnnnnnnnnnnnnnnnnnnnnnnnnnnnnnntttggaaagaccttgcgagaattttcttctattgttgtgtgttctgatttcgatttcattgtatttgataattattttgatagatttagtttataagtggtatttttttagaggttaaaaagtaatgattttgacaaaattttagacagtgaattttaatgaaagatcgaaaagggaaaaacttgtatacaagaccaaaaaagagttacttaagatgacatgaaaaacatattttcaaactcataaatttcatacatatcacactagatttgaagaacatcaccagtccattacatcatatcattaagcgaaaataaaaaaccataaatttaaactaaacaagcaaattaaagcagatccacagaaaacatataacataggatagatttagatatgatgaagaagaattgttcagcaaacacatagaacacatgatcgaaagtcttcaaagtcaaccagtactggtagtagggtgagaagagcaggtacaaaccacttgagtttgctcttccttcctgtggaagtttctatggcatccacatgtagcacaactcatagctccgccggtcccttcggcgccactggccacgaactccctgcagccatccacaacaattcctccaattctatatgcaagattcctgcagcactcgcgatatctcacgtgcctcacaatcgtcacagacgagttgttcgaacatctagcacttccatcgctgcgtaagaaaactctcctcattgtatgctctccttcttcaacttctctacctacaaagtcaagattgttagtggagaatcaaaattgtagcctgagttacaaagaaatcacaaatagacaaatagcaagagagagagatagagagtgagtacagcttattgtgtaatgggtgtgaagagccctaacccttgaaggtctatttataaagggaaaatcttatttagatccatttttaatgtaattataaaagtaactgacaagagaacaaccagaatcacgtttttactcctttcactctatatcttatattatagtaatactaattaattacattttattttttaagacatgggaatggtagaatttatttccacactagttagaggattgattcttaagtccgctgtatgaaaaaactcatatttatggtaaatatgtattctattgataagatgtatatattattaaattaccttaaaagctaatgtaatgaaaaataatgtaatttatggtaaataaattcaacatcccattcattgttttattgtcaaaatataattgttttttttttactttaatccataaaatatataattatattaattaacataattatcacgaacataaattttgatttatattaattaataacatcaatatatatttctattaattcaaaattacaaaatatttaaattaaggcaattaacctttgtcccttattcaaatggttaagtgttcaaatgttagttgagatgacattaattatataactcaaagataaaaattaaaggaacatatgttcaaaaagtgttaatatgaaaaaaaataaaagattaaagtcaaaaactgattcaatcaaaaccactttgaatttgattggataagaataaaattttgaaccaattaccgattagataatgaattaaaaaagttaaaataattggattagattatttttctattaaaaatcgatccgcaaatactatttgactttatgatactcggtattattttttactttcccataaatatatttttttcatagacaatcatgttagagatataatcggatacaatatatgaatattttttctaatgtgaatactaacattggttcggcacgatgtttgacactattttctttagttagacccaaccttcattggttatttgagtgttggatgttactaattttcatttaaataagtctaataaattaaaactagtcaaaattagataatatgggtttcccacctattgtatttgcatctttgtgcacatcctaaattttgcatcatcattctctatcagaatttcatcgtctccaccttactccttggtgtcgtgcaacaagtaatttaatcgatgttgtatattcgtataaattatgacattgttgaagtatatttttactacatagcttttatgcaactctcacccaagtatatcttttgtaatacctaattccatattcgtgttcgattgtcacaagattttgaatgatgaaattctccttgtctgacaatagaggctcttgctaattttctaacaatttatctctatatgatatttgagaatatgagacccagttgccttttttatacatttgttgatcaactccaccctgtcgtgtggtttttttaacgataattgttgatccttgttgttgatatccttgtaggtttcaaacaaaattattccttccataagaaatatatgtccaaatttagcaatattgacttagtaacaattgtttattagtttgggccaactttttttttggcttaaaaattacttaattttttttaaaattaagatatcttcatagtaatagtcaaaaatcttgagactacgaggaaaaagtatttacctaccttactattttgtaaatagacaacctaaaactttaatttaatttattctaccttgatccttaaattttatcttttttgaaaatagattccataagctctaatttcgttccaatttattcttaaactttatcctttttgcacacaaacactttaatttgaatttcatcttaaaattttctcttttgtaaatagtcttatattaatttggggttaaactagtaacaaagaagaaatccaaaccattatttattttaaatcccaatcatttactaattatatgtttataaatcattttccaaatagcagaatataataaaatatagaattaaaaaataaaataaaggttgtttaattttttttctttctaaattcctttttttattatatattaatatactaaaatgaacatgcagtatcacaaaagaagaaaaatattaatcaatgattgacatttaagataaataatttaactcaactatgatagaaataactatctgtaaaaaggataaattttaannnnnnnnnnnnnnnnnnnnnnnnnnnnnnnnnnnnnnnnnnnnnnnnnnnnnnnnnnnnnnnnnnnnnnnnnnnnnnnnnnnnnnnnnnnnnnnnnnnnnnnnnnnnnnnnnnnnnnnnnnnnnnnnnnnnnnnnnnnnnnnnnnnnnnnnnnnnnnnnnnnnnnnnnnnnnnnnnnnnnnnnnnnnnnnnnnnnnnnnnnnnnnnnnnnnnnnnnnnnnnnnnnnnnnnnnnnnnnnnnnnnnnnnnnnnnnnnnnnnnnnnnnnnnnnnnnnnnnnnnnnnnnnnnnnnnnnnnnnnnnnnnnnnnnnnnnnnnnnnnnnnnnnnnnnnnnnnnnnnnnnnnnnnnnnnnnnnnnnnnnnnnnnnnnnnnnnnnnnnnnnnnnnnnnnnnnnnnnnnnnnnnnnnnnnnnnnnnnnnnnnnnnnnnnnnnnnnnnnnnnnnnnnnnnnnnnnnnnnnnnnnnnnnnnnnnnnnnnnnnnnnnnnnnnnnnnnnnnnnnnnnnnnnnnnnnnnnnnnnnnnnnnnnnnnnnnnnnnnnnnnnnnnnnnnnnnnnnnnnnnnnnnnnnnnnnnnnnnnnnnnnnnnnnnnnnnnnnnnnnnnnnnnnnnnnnnnnnnnnnnnnnnnnntattcaattaaaatattgttgtaattaagtatttaaaagcttaactccaaattatttaaaaaaaaaactgaaatctaaattaaattgaaagaatataaattatcaatatttaagatattaaatttatttaactacatcatatactcaatttagtaacgttctgttatttcatgtaataaaaataaactatagttaatatttttaattttctaaaccaagtaatttaataacaaatttcgacctcacaataaataaacataatttataataataggcttcaaagattctgcaatctagtatatacaattaccaaaactgtttctagcatattaatatatatacaatatatacaattactaaagataaacaggacaactttcgaacaagtatttcattttattttttgtgagtgtgtgtgtggaaaatgaagtatttcaggttcatatatagggatgctaataaatatgataaaaaagaataacttgtcagtttttatattcgtgtgcctaaatctggtgtgctttaatattactaattatttttcattatttgagtcttgttaataaaaacaaaattatgtattaaaaaaccttgtccaattactgcttgtttaactcttctttaaaaaataaatcaatttgaacacgtgagtttttaagaaactaattaatccctagccaacgagaagatcgatttccatttggaggacacagtaaaattaaaatggttcagtaaatttcatctttagcttgaaataaataagccatatggcaggcttaggctagctttcacccaattcgtgatcagtttcaaggcagttttaatcctaacacacactgtggaccaccaaattatagtaaaacacagtttttgtgagactaaaactaaacgttacttgaagtagcacacagtttttgtgggggtgcacagataagattcgactaactattgtctctatgtgaagctcttgaactaaaacgttacttatagtaaaacatagtttttgtggggttcacgtatataacgtatgatgccacagaggatttgtctatatgtgaggctctttgccttaaaacgtgagcatcattggtaagtttcatttgcccaaccatccaaagttttccgggaaaccgtcatgtagagagcttttaaacctaaaatccgacatgcatgagaatgaatgagcatctttgtggaaaccgatgacacaaattcatcgaactgaaatggttgttgttcgaaaactgtcttcatgtgaaggttcttgaccaaaaacgtgagcttcacagctaagctttgccaaaccgtcaagtagctcccgaggaaaccgaagtgattgttcgaaaactttacctaaaacgtgatgtgagtgagcatcatatagtaactgctaagattttccaaacgcatgtatcaaattcaaaatgattcctcctttgcatatagacgttttattatgtaagaactcaatttattagtaaatgtaataaatacttgttcagtaattgtatgctaggaaaaaaaaaaatacacgactgtggctatggcaagccaacttgtttagtaattgtgacacatcaaaggcccgatggccgtgcctatggctgccaacttccatagggttcatttgaactcttaattttgattataaaatcacaaaaaaaaattattcggtgatattttattatattatttgataacacaatttaaaaatatgtttatgcatagatattgtttaaaattatttgacaagctagtttaattattactcatttaatattaaacttatagaaatttactttatagtatttactttgaatctaaacaaaaaaggcattgaaatgaataataatatagggattaaatttcataaaaatagtgtgatttataaataaaaatgtttgatgaaaatgatcgtgatgaaatcatacattcagttaaatattaattcatttggttcttataaaaaatttaattccttttttattattattattattattattattattattattattattattattattattattattattattatatcaaatcgatttactttatatttgaatctcaatagttgagaattttaaaagataattaattgaaagaaatattattgcgttaacattgaaacaaaagaaattcatgccctattagaagtattacatttttcaaaaattattctattttacatgcatgtaatgttttgcagaattttattaataatattttcaattgtgtttattgtataaaagaattaaaaattagaaatttctagattcaatttgagataaattatgttgcatgatagtaatcgaatgaattgccattaagtgagacgaagaaattgcttgattaatacactttaattaacagtaaaatactacaaaaaattaatgccctatatcttagatgtattaagctatattaaaaattgattttttttacatgcatgcaatatttataaaataataatacttgtaattattgtcattgtcaaaagaatatcttaaaaaataaaattttatacattaaatttcatcaactataatgcaagatagtgattgaaagaattaaaattttgcttgattattaaactttagttaacaatttttgcaatttaaaaagttaaaagaataaaaagaaaaggggagaacttagactaggactcaaatataaaaattacttttaaacttcaaaatggatccagatcagattagtcattatgtatactccttttattattgatagggctcttcatacccgttacacaataagctgtactctctctcacacacacactgcctctatctctgtctctcattttttctttctatctgtctatttatgatttatgatttgtttgtaactcaggctacaattttaattctccactaacaattattttttacaacaactttgcagttgaaggtagagaatttgaaggataacatacagtgatcgagatgcccacacaatccattatatagcgagtgccgaaggaataatgcgtgtagggttggaagatatgttttggatggctgcagggagttcgtagcaagtggtgcggaaggcactgatgcagctctgacttgtgctacatgtggctgccataggaacttccatatataggagggaagagcaaaatcaagtggtttgtgattgcaatggagcttgaagactatgatgtgttttatatctgcacaactatatgtaaaccaccctatgatatatattttctatggatatgctttttcttgttctgtagttatgggtttccattttatcttaatgatgatgtaatggacttttgttgttatgggtttcatgtgtttgcaaaagaaaagttcaaagttgacaaataataagttttattttggcatgtcatcctctactaacaacacattttaatccaattctttttcgatctttcaccaaatcttgtattgaaatattagaaagcatctacaaaggtgttgcataaattttttatttaattttgctgataattacaaaaatgagctacaacattcgaatccttttgtataataaaaggagcagtaattaactttttccgattacaatgtatatatatgaatcgctttggtcacaacgacttaggcatttgttgttgttgcacaactagaattgaagcattagtattggtatcagaggaagcaagcaaatctccaatcacacccaactcagaaaactctgtccaactctcaagtgctgctgtctgaggcgatttgatcccattacgtctcccaactatgaaaaaatcatgctggtttgcaatatcagacacaaaagcactgatctgagaagattcctcaatagcaatcttttcgtatgacacattctcgatggtaccataatacccctgaacactttttagcacctcatcatccagcatgaggtcccagtttgccacctcactttggctagaaaccaagtggtacacaaccaagttacaatcacaatctttgatggtcctcttagccaagcatagtgcctctctatcatctgaaccccccagaaagatcactgctatttgcttcgttgatgatgatgaagaagaagaacctcgattcacgagaatccccacggagcatggtgctctctcaagtaccttagagttgagagttctcatgttttcatcagttgattcaataccaccatcctcgccccatcttatgtgaaatggaagtaagatgatggaagcaagtttgtccaatgcaaggtaacaaatatcatcatgcatgaaacgtagtggagatatggctgtgtaggtgctaactgatgcagtgccagcattgtcatgttcaaagaggtcgaatgccacaatgacatcttcggagtatttaatgtggcttgggatagccctttcttggagacggtgtgagatgaagatgggagaggatctgccaactaactccatcaaatgcaagacgtgaaccactaaagggtttgttattgtggggcaccaaatgtcaagagcgttttttacggaatttatgtggcttggtttctggatgcatgcaaccacccgaagctctgagttgggtttcaagctcagtatgttccttttctgataccctgcgtacttccttgctgggttgtatagagatttcaccccaatgcgtgcaatgcttcccaacacaagcactgatatagccatcacggagactgtttcattgctcattaactgcattgcatgaggaccaaaattagattactagctagctagttttatagttaagttaaacaagtatttacctattttaatctatatctctttcaatattagccataaaaaaaagataaaattattgtaaaattcaagatcatgtattatatgaagattagtcgggatcaaatgatttaatatcatgtgatctccaccaatctcattctcattaagttaatcaatattaattagatcatatagtcttggactatatacaatacagtcatttttcgttaaataaatataaaatacctaaattaaagaatattatgatataagaattcaattaatttttttgaaaaagaataatttaatttattatttttgtgatatatatatatatatatatatatatatatatatatatgagaaggaaataaagttattctaatatattgcgtggtaccattgaatcaaatagaaagatgtgggtgacgtagtcaacgacacctttgcaactcaacatgagagcgaggcagaaaccatccgttttgggcatgttgcaataccggcaaattccaacagttagaagcatcttaaccaaatgcacagaaacaattatggagaccacaacgagaaccaaggtgccactcttaagcgtggaaatatcgaccttcatggcacaacatgtgacaaagatcggcaaaaggaaccatgtgttgatcatctcaaactgcttgaccaattgggagcccaatggaggaccttctggcacaagaagaccaaagagtaacatcccacctaacacagtctggttagcccacactccaagcaagcctgcgcaaagggtcatgaggaacacaatgtacatgtatgctttcttcacaggtcttccttcttgtgtgttgctcacaatccacctcattgcggggcgtgcggtcacaattgttaatgctataaaaatgaagtattttgtggctgtgtaggttgcaagttcaggtcccttcccttgggaatgatcatgagaatcgagtctaaggctgctcacaacagcagttcctagtcctgtcacaacttggcttatcacatccatgacaagtgctgctgagagtgctaagcgaccaagttcagagttcaatatctcaagatcagagagtagagaagctaccacaggaaaggaacaaccactgtgccctattactatcacgggtagctttcctccatcgaactctcctagggctttttgcgcctgtcccatcaaagtgtaggataccaagagaccaatgaaagtgggaatcataagggacgaaagagcgattgtccaagctttcttccctgttctcgttatcatgctgaaatccatcttcaccccgttcaggaacaggaataatgcgtacccaaaccctgatactaggttcaacacgtcttcactcccgtaagggaacaacagcactttgatttttctcaatgcctctatcttcagagaagggcctagaacaaacccagcctgcatgcaccaattcatttggaaattaacatttttattgcatgtttggctacaaattatttcatttcgatctatattaacacttacaaggaattagtttcatctcaataatctatgtaataaataaatatttatctaaaagttgctatatatgctaccccaactttttatctaatttatttattcctaagttcaatcctatctatgtatagtatatggattgatattatatgatttttcttaaaaaaaacacacacacatatatatatatatatataacaatgacatgcatgcatatgctattagaaaatagtttttttataggcaaaaaatatatattagtaaagaccaaatgacataaaaagtgtcaaagtttggccaaaacagatacaagagaacatatatataaaataaaaacatgaaagcgcctctacctaaacacatacgcaaacatgaaaggctattagaaaatagtgtttttctatgtaattaacatgttgtgccacaaatatgtcatgtggcatgcatgttcttgtatgagacctgcatgcagtaacagagaggagaatggacaaagcatatatacataccatcatttgtgaaacgaaataagggaagcctaggcgcctaagcaccaaatgaaagcattgcgtgatgacgaaaatgcagagaatttggatctctaacagtggcattgttgctcttgaaactaaagcaccataatctctgctaccccatatgccatcggatactatcttggatggcatgtccatggtaatattatagaaaaggaatcttctgtctgggtctgaattgtagtcgtcgaacacaactctactgtaaattgttctgtttatgctgaatagggtatcgtttgtccccatgatgatggatgtttcaagattattaaagaacaaaatacagtagctagttagaatggaatgaatgataatcgttattatcaaatcagaatcacaaatgaagctattcacactaagccttttttatatattgctcatttgtggtggccacattagttggtgtgagttgtgacagactagtttcttagcatcatgactttggaacattgtcataacaaatcataactatatatataacgggttttttagtagcttatttcatctaattaaccgaaacaagaattacaaatatacataacaagtcaaactgccttgtcacgcctaaaccacaaggtggtggttataccgttgatcagcttctcgttaatgttatattcacattcatggaagagattggaacgttttttattttatttttcttcatttgaataatattgccagcttattttttttttttttcaaattcaattttcttttgataggacactaaatatgggggaaaaaacaacaaatagttgtctttctatgttgtatatacttgtatacacgatggataggtccctttttaattgaaattgtccaatttgatctcccaaatttcaattgagtaaattaggttctttttaattgaaattaaatggatgacgagtaatcaaattaagattgtaaaagaatttttttattaattgaacaaattaatgtcaaattaaagcaagttatcctttctaataataatcaaattaatcatgatacaaatttgtgtcgtaattaattcaatttttatttatttttacnnnnnnnnnnnnnnnnnnnnnnnnnnnnnnnnnnnnnnnnnnnnnnnnnnnnnnnnnnnnnnnnnnnnnnnnnnnnnnnnnnnnnnnnnnnnnnnnnnnnnnnnnnnnnnnnnnnnnnnnnnnnnnnnnnnnnnnnnnnnnnnnnnnnnnnnnnnnnnnnnnnnnnnnnnnnnnnnnnnnnnnnnnnnnnnnnnnnnnnnnnnnnnnnnnnnnnnnnnnnnnnnnnnnnnnnnnnnnnnnnnnnnnnnnnnnnnnnnnnnnnnnnnnnnnnnnnnnnnnnnnnnnnnnnnnnnnnnnnnnnnnnnnnnnnnnnnnnnnnnnnnnnnnnnnnnnnnnnnnnnnnnnnnnnnnnnnnnnnnnnnnnnnnnnnnnnnnnnnnnnnnnnnnnnnnnnnnnnnnnnnnnnnnnnnnnnnnnnnnnnnnnnnnnnnnnnnnnnnnnnnnnnnnnnnnnnnnnnnnnnnnnnnnnnnnnnnnnnnnnnnnnnnnnnnnnnnnnnnnnnnnnnnnnnnnnnnnnnnnnnnnnnnnnnnnnnnnnnnnnnnnnnnnnnnnnnnnnnnnnnnnnnnnnnnnnnnnnnnnnnnnnnnnnnnnnnnnnnnnnnnnnnnnnnnnnnnnnnnnnnnnnnnnnnnnnnnnnnnnnnnnnnnnnnnnnnnnnnnnnnnnnnnnnnnnnnnnnnnnnnnnnnnnnnnnnnnnnnnnnnnnnnnnnnnnnnnnnnnnnnnnnnnnnnnnnnnnnnnnnnnnnnnnnnnnnnnnnnnnnnnnnnnnnnnnnnnnnnnnnnnnnnnnnnnnnnnnnnnnnnnnnnnnnnnnnnnnnnnnnnnnnnnnnnnnnnnnnnnnnnnnnnnnnnnnnnnnnnnnnnnnnnnnnnnnnnnnnnnnnnnnnnnnnnnnnnnnnnnnnnnnnnnnnnnnnnnnnnnnnnnnnnnnnnnnnnnnnnnnnnnnnnnnnnnnnnnnnnnnnnnnnnnnnnnnnnnnnnnnnnnnnnnnnnnnnnnnnnnnnnnnnnnnnnnnnnnnnnnnnnnnnnnnnnnnnnnnnnnnnnnnnnnnnnnnnnnnnnnnnnnnnnnnnnnnnnnnnnnnnnnnnnnnnnnnnnnnnnnnnnnnnnnnnnnnnnnnnnnnnnnnnnnnnnnnnnnnnnnnnnnnnnnnnnnnnnnnnnnnnnnnnnnnnnnnnnnnnnnnnnnnnnnnnnnnnnnnnnnnnnnnnnnnnnnnnnnnnnnnnnnnnnnnnnnnnnnnnnnnnnnnnnnnnnnnnnnnnnnnnnnnnnnnnnnnnnnnnnnnnnnnnnnnnnnnnnnnnnnnnnnnnnnnnnnnnnnnnnnnnnnnnnnnnnnnnnnnnnnnnnnnnnnnnnnnnnnnnnnnnnnnnnnnnnnnnnnnnnnnnnnnnnnnnnnnnnnnnnnnnnnnnnnnnnnnnnnnnnnnnnnnnnnnnnnnnnnnnnnnnnnnnnnnnnnnnnnnnnnnnnnnnnnnnnnnnnnnnnnnnnnnnnnnnnnnnnnnnnnnnnnnnnnnnnnnnnnnnnnnnnnnnnnnnnnnnnnnnnnnnnnnnnnnnnnnnnnnnnnnnnnaaaaattataagtcttataaccaattttgaaaaaacctctgtaattaatatgtatcatcttataaactcaagttgatcaagatttaaggaatgacaatattcattctcataagagatctctcacatctcctagactcttatttcttctgcttaaatacacaaccccctctatcttgaagtgtctcttttttcagagacttatatttatagcgaatgactaactaaacaacttcttagatactaattccttaaactcatatataaacaaaaaatgatcttgtatgttgaaattaatcataagtaaatctaactaattttatcatatttaatgttatcatttataaaatagtattcatttaactctaattatatttttaatgactcttttatatttgataataagtttcaattaaggatattttaaaaataatcttattttttaaattgagattagtaaaactaaataatattaactaattttcttaattaatgtaattagtcatttttatttatgagtcgaaagggagtaatacaaactaattactactttttacatttccaaagccattgaaaataaattttctaacttccaaagttaaaagtgaacttctgaacttctccatgaatcagacataaattccaaaaacaccattttgtaaaatgcatgggaaacaattgagtttacaattttgaaatatcattccttacggcattaatttcagatatgctcatcattgaatcaagaattacaggtattttggcacaatagatgtgagtctaggagagaaccttctctctatggtcgaactctgaattgcggatgtatagcaattactaggaagatgcactttttgtcttaatactcagaccaggacaggcacaaaactttgtagtgttttcatgttgttaatttggtacgagcaaacttccaaacttttcaatagaactgtttgatttataccagcaggcgcagcaggctaatagaaaccacacacatgacacgaccctaaaaagaagccatagtcatttctcaattccggaatgacaaagcaaaaccccacctcttagataaaataaataaaaccgaccacacacaaagtttcaaggaaaatgatcttttatctcacattaaaacagcactagcttgtcatgaccatcaattaagtacaacaagaaagtttcaagagagagcacaagccggactgcagcagcatatgttcactaaaatactgataatagcacataatttgaatgtcaacttgatctctcaagatacataaaaattggccatcagaactcagaaagtaatgcctgcttttattaatagctactttagctagtcataacctgctacaattcttcaatcctgcagagaaaaagataatagacaaaagttatggcacaaccaaatacaacttatacaagaagataaagaaaatagattgacctgcttagtcacattaccaagagttagtttagggaagcgcagcacaacttcagataaaactttcttgcatatatatagaaaatttaagacaagaaattgttcactaaatctattagctttccaactaagtggagataaagttttacaatacttgattctgaatcatttctattatattgaaaatatgcaagacattgacaatggccatatatgttaattgaaagcaagctccccaaagcaatgtaacaatactcatatgtctagtagagaatgattgtgttggtatctaaagttccactcagactgtgaagcctgggatagaggaagatattgccaccagtgtttaaaagaaacttccatgcagtttaccttataaacatatatatgcatgcacaacaacaaataaaaaagatgacattttgttatttatgattaatgattgtacattcaaatgcattcaattcattaacctgcatatatatgctgatatgcatagttgcataccaataccttgtaattttctagagaaagtggaaaacaggatatgtagattatcgtacctcatcatcgtcatcgtcatcataatcacgatcttccttctttttcttaagacgggtagtaccactttctttgctgatgggtaacttcattgctccaaagggagtatcaacatcaatatgtcctttcatggtgtaacctattccccttcctctaatcatgtcccagagtgcagagccaaaatccttaggcctgaaggtaattggaatatcaatataactaattccacttttctcaattttagcagacttggtgagttctgcaccaccaatgctaacatcaccaagccagacctcgtaatcgagcgcattgaggccaaggtcgaaatcattcttgttttccaacttcaaatgaagagttgcaattgtctcttcaaaagagaacctttcaaaatgaatcttctcaagatcaatatcaggcttgtatggtatggggatttctccagttttctctaaaggtagagttagccttcccaagatgggaacatcaaaaatgagactaaccttcaccctataaggaatgatgcttccaggtttaatatcagcatatgtttgcttgatgtcatcataaatcaaagtgacaggaattttgacagtctgctctccatgtgcatggatggtacccgcatccggtatcattccggaaactagcttcctttcatcactgtcaaccaagtaatctatgtcaatcagagggattggcaccggattcgggttcttgatgagcacatcaacaacaagatctgccttgtgaagattaatcgatggaatgtgtatcgcagtaacgtcagcagttggcttcccaaacccaatagcttcctcaatcttctcaccaatgtcatgaatgaaatccttcaccttctcaatgaatccacccttcccctcctcttgatcatcttccttgtgcttttcatccttgctacccctttccaccacttctggcttatcagatgtcgacatatctaaatcgcagatagtaaatgcacacaacagttagcttgagcatgacccaatcagatcacacaaaaaatcaaagttaaccaaagagtcacaatttaactatccgatcaattatttacaaaagaaaacactgtaacatgctggatcacttgcattagcattagatacaaatatatcattcaaaatacaaactttagatctccatgctccaaaaaatgcagcaaaactcatcattccatataagggtagtactattttttttttatataattacgttttgtcaatggatttcccagtaatcaaaatggaagatagacagaatcatgaggtcaatgcttgatcaattgagtagaatataagataccaactctacaaaaatccaaaatgaagcatggtctaattggcctaaagctgaatcatacatatagtgggaataaagtagaaacatgagaaagagagtagagaagtacctgaaaagtgagatgagatcagtgatccaagtgaaaagagagagaatataactgtgaatgtctgaatgagattaacaaaacacaacaccactccacaacagcagagagatcaagattttgtaggggggaaataattaaataaattataaaaaatacaaaattgtaaaaaccaatatcatcaaagtcttggattacatcaagggtcagacatttgctacagagacatgaataaatggtagccgttgattgaagtcagggttggtttgaccatagaaccgaccattccactctgtaaagcatggtccacacggaatgcacatgtgactgccacattgtttattgtttgaatagacaccgaccaaccactcactttctcaatatttcaactttattaacgttacaattacaaagttaagaagaaaaaaaagtctatatttgattaaaaacttattaattattgagtttaaattattgataattaaacgacttaataaaagaatagtcaaattttaaatatattgtcaagttttacaaattaattaattaattaattgataaaaataatattatacaaacaaatttgaaattcttttgaagtaaaataaaaatataacgattactcattcacatatgtcaaaagagacacgtcgactcatttttttatttcgaattttaattaaacaatcctcactattcaatattttttattatttcaattaaaataacataaaaatgaaggtctggaagaatgacagatagaacagaaatgttctgtttatcgctacctacaaaaataatttttaatttaatcatttaaaattatatgaattattagtatattggtattttaaaaattaagtttaatcttcatacattgtgaatgtaaaattttggtttgactgtattttatacctccaaagttacacaatttcgcaaattttgcctcctaaattatgttttcacaaattttatgccagtgtagtttaagacaatttgtgactttttgtaaattttaaaggaaaatttcacacaaaaaaaaaatatgagaacaaaattcgcgagaaaacactgcagctaaacctaaaattttatatactaatnnnnnnnnnnnnnnnnnnnnnnnnnnnnnnnnnnnnnnnnnnnnnnnnnnnnnnnnnnnnnnnnnnnnnnnnnnnnnnnnnnnnnnnnnnnnnnnnnnnnnnnnnnnnnnnnnnnnnnnnnnnnnnnnnnnnnnnnnnnnnnnnnnnnnnnnnnnnnnnnnnnnnnnnnnnnnnnnnnnnnnnnnnnnnnnnnnnnnnnnnnnnnnnnnnnnnnnnnnnnnnnnnnnnnnnnnnnnnnnnnnnnnnnnnnnnnnnnnnnnnnnnnnnnnnnnnnnnnnnnnnnnnnnnnnnnnnnnnnnnnnnnnnnnnnnnnnnnnnnnnnnnnnnnnnnnnnnnnnnnnnnnnnnnnnnnnnnnnnnnnnnnnnnnnnnnnnnnnnnnnnnnnnnnnnnnnnnnnnnnnnnnnnnnnnnnnnnnnnnnnnnnnnnnnnnnnnnnnnnnnnnnnnnnnnnnnnnnnnnnnnnnnnnnnnnnnnnnnnnnnnnnnnnnnnnnnnnnnnnnnnnnnnnnnnnnnnnnnnnnnnnnnnnnnnnnnnnnnnnnnnnnnnnnnnnnnnnnnnnnnnnnnnnnnnnnnnnnnnnnnnnnnnnnnnnnnnnnnnnnnnnnnnnnnnnnnnnnnnnnnnnnnnnnnnnnnnnnnnnnnnnnnnnnnnnnnnnnnnnnnnnnnnnnnnnnnnnnnnnnnnnnnnnnnnnnnnnnnnnnnnnnnnnnnnnnnnnnnnnnnnnnnnnnnngtcaaaggctaataataatatattaatccgactttaagatttttctcttctgctatttctttttctttttctttttgttattgctgagaattcctaatttatggataaacctcatttaccaaaaaaaaaaattatggataaacctcccattcatatacagttgtaatggtaggcagcgaggcagtagacaaaaacatttatattttatagtatcttggacactacattggattcttttgaggtaaatctagcaatatacattggattctcttatattatattacataatgagggtagattcacatattgtcctgtccacgaggccagtgtccatagacaaaatgcaatcagaattctcagtaaattgtctgaatgtctgtctttcaaatacaaccaattagcatctcaaaaatttcgacatggcagccacggattctattataattataatgtaacctaaaacttacgactcacaaaggcaaataaaaaaatgccttggactgatgaaacaaaattatataaatgattcagaccacaaggtatgaatcattactaacttaccaatatagcaatgtagattttactgttgaaataacacttataatacaaggtagaaaaaactcataattacaaggggggaaataagatgtaaggaggctcatcatgtccccagaggagctctgtcatctggtccagcaagcatgatctggcattatttgcatttgcaatttagaaatggtgacaaaaaaaaaaaaataagagaaaagttgaattgtgaaattctagcatatatttaagtttcagaaagacatacattacagtcaaatgcaaatctccttgcaagcatgatggcagcattcctttctctctctgattcaaaagctaatacaaaagaatgcccctgctttggctgccaaaatagtgcttgtgcagcagcatttccacctccgcgaactccacaaagctaaaggaaacaagatcaaagcacaatggttgaccaaattccagtttatcataaatgacaagggaggataacacattccaaagagcatgaaaacatatgcattttcataaacatcaaaatggcttcaaataattcttcaatgcacaatgttagttaaactatgtgcaagaaagaggttagaacattgttttgcttgtcaaaatcaaaatatagatatcatcaactatttgaaatacctgcattgaacttgaatagtattctttggcaattgttgtctttcctttacaaagtttaatcctcatctttccaacatgaagcacatgaatagattcagttggatgatgtgaaccattcatctgtgttacaaccacctgcaaagtagtaaatgcaactacaatattattgtcacataatctgactagatttgccttctaaattttttatattggaatgtggagaaaaagtacaagacaacagcaattcgtcaaaactaaacactacttttaatattttgattacaagactgaagcaagtcagcaacaacccatggaaccatacacatttcagtcaaaaaacagctccatttaacaaggctttcatataattatattaaagttaaaaggataagagcaacatacgttgaattcagtgtcatgtttgcgcactagtgcctctacataggttcccaaaccagcagctgcataagagtacaaaataaatttaagctcgacatgatttcagaacacatgcttcaatctcttaactgataagaaaaaaactttatgtttgaaatagaaacaaatatatagaagcaatgcctgtaagtgactactaatgcaaatgaggacaactcaaattgaaaccagacctggatctattggaccagcggttgaaagtgtgacgtgctcgctttctgaaataatatcaacttgcaatatgcgtccaacatcaaaaggttcaggggcataaactgttttggttgctcctgagaaagttgtattatatgataagcggagataaaaacaaagaactaattggatgacatgtttaataacaatcagccttccagtatcttgaacagaacaacttacataataagccccactgacagttaagattctgattgattaacattatagtataatagccacaaaaagcaagtaagatgtacgaataaaaaaatcattagtatatacaaaaaacaagcaatcagtttgaacatacatctatgatgaaaaaagttaacaagtttatcagtaggtgagggtttgagtgctgccggtatgtcatttataattttctacaaatactaaggatcgagttgccgtgaccaaaactgttattcacattctgcccccgggaagtgacataataaaaagtgttataccagaagttgaaaaatgcataaaccaagagtcaattgacttgcatactcaacaaaaaaagaaaaagaaaaccacagaaacaatacctgagataagttcttttttggcaccatcagatgatacacgataccactgaattgaacattttgaaacttcaggggcattatcagagcaaggttgaatttgcaaataagaacctaacgtttcattcccttcaagttcatataaatgtggaacattttccccacctttcttcgtccttgttaactgaacagtagcatcaaggataatcagtaaaagaagattacaatggtcaatggaagacaatcacgaaagtcctccatttaaggaaagaaacttaacattcacttaagacaacaatatagtttaacatcaaatcccaaattctaattcttattcatatcattaaaaaccatcatggaattttccatcacaccgtgtaagacattagaagattcccccaagtctatctaaagatcatatacagcagcaaaggaataagaaaattcacatgtttgatgtttttcatattgtatttagtttcttttttttttttttttacatcactaatagaaaaataaaagaaatatgaaagaattataggaccatattttcagtattgccagagaatttaacagcatgaaagtattcgctgcatgacctgaagcatagatgacataaaatgccccaatagttgtgatacacacacaacaatcgaaaaagcatattatccacataatctgtgcatgatgtcaaaccatgttatgaacacggattctcaaccgccaaaccaaaaaccaaattgaagttacataatgtgattcatcataacatgctacttaaaaaacaaacagcttaaagtcttacacataatgctgagaaaatatcaaagaattgaccatggatgcatttcacaaaataatcttttcgacatggcataagatgacaggcatacctccttctgaagttgaagatactgtctagtcttctctgcaagttgagccctcaatgcttgaagctcatgttccatatccatgacctatatattaatcaacaatcaatgtattcatcactttgaaataacttgataaaatgttaacgacaaagaaaaatgaagtctaagaaaataaaggtaagaaagccaataaatggaacctagaaaaagagaaggcatttgaaatagcagatatatgagagacaaaatagggacatgtgttcaatatataccttgcttggctgatgcagcattttaattcttcgagcctcttgaacctccctcgttaattgctccaggtcctaaccatagagccaaatgttattcaaatgattattactaacaatgcatagaaaggggaagcagtagctcaagggtatcacataataacaattgccaaaagagtaagatgtttagtccagggctccaggctttcaaggagaacagaaaactagaagggagggaaaacataaatgcaagaaacattgaagaataattttaaaaaataaaataaaatcttaagcataatttaaaaataaaaataaaatcttcagaatatgatatttaagtcggatgcacttatcattatggcatcatgaattactaaattccccatgataaaacatgacaaatgacaagtaaatatcacctgtttcccggaagcttgagacattctctcatgttcttgaagtgcctcttccactctttgaactgctgctctggcatcctctatttcagcacgagcaaaagctctttcctcatcaacaagtttcttagcatcttcagaagcctataaattaatataaactctcagcattggtaaaggaaatttctttatgcaggcatataaagaagatataaactaacaacatatttctttactcctttcttctttttttcctatttctaataaaacttcttccatcaccacataaaataagttaattcacctgcttaagaaaatttgcaagcttcttcacctctgccttctcttgtattagttccccttccctctgagtcaactgaactgctagagcttcaacctgaagaatgcacaaaataagttacagttgcatctcttaaaaagattgcaaatgcacaaataaactagcaccaggatgaatattccattaaaaaaattaaaattatttttctgtgattgaagcaatgaaggtatttagtattatctagataataaatttttcttctacaagcttatgcaaaatttagtaaaaagtattcccaagtttattctcaaagcctttccattccccacatacacactcccaatttgacttttaaagagaacaaacaagaatttatatttatactgtcagcttcatacagaataaatatgaacatatatctgttagatagaaacaaatgtgaagtatatatcttcttttaaaaaaaaaagaactaaccatcgcaatagtttcttctacatcatccttgtttctgcctgccacacgcccttttaaggattcaagtgcatctctaagcttcttcaaaagaacatgtttttccaatgatgctgcctctctaagtctagcctgaacttcaccagcatacaaaaagctagttaaaaaagggacatcagtttattagaaaactatgaatatgatcattggttatttcagttgcaaacattttacaataagaatctcaggttgcaaaaccctccaaaaggaagaactatattcctaagggaggaaatgaatttcaatcagaaggaagggtaacctcttccgacaacttagccgcggccgccaaacccttctcgaatttactagcaaggtcgcgaacggagagacgattatgctgttccaacagctgtgcagtctcacgagcaacaacatccttcattgatagcacttttgggtcatcctttgtctctattatctgattgttagctccaattctgtaattaggaaaccgactagaagcaaacagaacatcagaagaaaccgcaggcacagcctccctttgcattgtatcaccaaaatcacgagtcaacctcgtcatttttcacaaccaattacctctgccaatcacaaaaacacgccctttagcaaaggaaattcaacaaattatagcttagaataattaaaaaaaaaaaaaaggaacatacacatactcagatatatacatgaagaagagaacaaaaannnnnnnnnnnnnnnnnnnnnnnnnnnnnnnnnnnnnnnnnnnnnnnnnnnnnnnnnnnnnnnnnnnnnnnnnnnnnnnnnnnnnnnnnnnnnnnnnnnnnnnnnnnnnnnnnnnnnnnnnnnnnnnnnnnnnnnnnnnnnnnnnnnnnnnnnnnnnnnnnnnnnnnnnnnnnnnnnnnnnnnnnnnnnnnnnnnnnnnnnnnnnnnnnnnnnnnnnnnnnnnnnnnnnnnnnnnnnnnnnnnnnnnnnnnnnnnnnnnnnnnnnnnnnnnnnnnnnnnnnnnnnnnnnnnnnnnnnnnnnnnnnnnnnnnnnnnnnnnnnnnnnnnnnnnnnnnnnnnnnnnnnnnnnnnnnnnnnnnnnnnnnnnnnnnnnnnnnnnnnnnnnnnnnnnnnnnnnnnnnnnnnnnnnnnnnnnnnnnnnnnnnnnnnnnnnnngcatgttttcaaagttttccacaaggaaacaaaaccccgcaattcctttttttttttttttttttttgagttgaagcagtgaggaaaagggtaacaagaaaaagacaaaaagaagaaagctttaacttacaggtcatgagaaggtagaaaattggtagctaggcttgtgattctaggatcagatgcaaaagggttttctccaatttggctatagtacacaagcagtggtcagatcaatggttttagagagagagagaacagagagaataagcatatacacagcatatggatagagagaaagatgaaagctttgctttttgaaaagaggaagcgaaggaaaaagaataggttgtgttgtgccgcccgtgggtgaactggccccccctttacgggattttagtgttaacgttttgtgttatgttgtgttgtctttgtgtgaacgttggccacaaccacaaaaacaacagctttgaatggaactaggcttacttggatccttgtcttaaagatgttacatacaactacaactatgttgttatgtttgttgctattacaactagtagtattgctactaccattaccattacctttcatcatgcttatgctttaaacttaaatcttgtccatttcagggtcccattccatggccttcctagctgttcaacgtttacttcactcacacagcttccattttctttttttgcatcaaaaaaatttaacagtgccaaccctctctctttttcttctttttctaatgtttcgtctgcaattatattattcacgttcaatgcattgggggttgctttccgtgttagttatttgactgggatttgttggtggtgccagtggagtcaaggaaaacttctcacaattataaacttttttaagtaaataaataaacagtatatacatccattgtagactttatattgttattaaataataataaatatttccttaatatactaagaatgtattctaacctcagatactaatcctgattgtagtgtatgattattgctgatccgagaaaaatttaaatataaattctctgattaaataaatcattttttacatataaatctagcaagtctgtactgatacaataacattatgattttgtcttatttgttgatgttaattttgtcatgattattttagaagtaatgcttacataattcctttttagttgatagtataagaaaatttataataataatacatatttttttttaatataagtagaaagaatttgatatgctaataacagtttttatgtgcattggttggtagatgaaaagtttctacttttctaaaaaatcttaaaataaaaaattatgattctcatatttaatatacaattaataaaaaagtttttcagaaannnnnnnnnnnnnnnnnnnnnnnnnnnnnnnnnnnnnnnnnnnnnnnnnnnnnnnnnnnnnnnnnnnnnnnnnnnnnnnnnnnnnnnnnnnnnnnnnnnnnnnnnnnnnnnnnnnnnnnnnnnnnnnnnnnnnnnnnnnnnnnnnnnnnnnnnnnnnnnnnnnnnnnnnnnnnnnnnnnnnnnnnnnnnnnnnnnnnnnnnnnnnnnnnnnnnnnnnnnnnnnnnnnnnnnnnnnnnnnnnnnnnnnnnnnnnnnnnnnnnnnnnnnnnnnnnnnnnnnnnnnnnnnnnnnnnnnnnnnnnnnnnnnnnnnnnnnnnnnnnnnnnnnnnnnnnnnnnnnnnnnnnnnnnnnnnnnnnnnnnnnnnnnnnnnnnnnnnnnnnnnnnnnnnnnnnnnnnnnnnnnnnnnnnnnnnnnnnnnnnnnnnnnnnnnnnnnnnnnnnnnnnnnnnnnnnnnnnnnnnnnnnnnnnnnnnnnnnnnnnnnnnnnnnnnnnnnnnnnnnnnnnnnnnnnnnnnnnnnnnnnnnnnnnnnnnnnnnnnnnnnnnnnnnnnnnnnnnnnnnnnnnnnnnnnnnnnnnnnnnnnnnnnnnnnnnnnnnnnnnnnnnnnnnnnnnnnnnnnnnnnnnnnnnnnnnnnnnnnnnnnnnnnnnnnnnnnnnnnnnnnnnnnnnnnnnnnnnnnnnnnnnnnnnnnnnnnnnnnnnnnnnnnnnnnnnnnnnnnnnnnnnnnnnnnnnnnnnnnnnnnnnnnnnnnnnnnnnnnnnnnnnnnnnnnnnnnnnnnnnnnnnnnnnnnnnnnnnnnnnnnnnnnnnnnnnnnnnnnnnnnnnnnnnnnnnnnnnnnnnnnnnnnnnnnnnnnnnnnnnnnnnnnnnnnnnnnnnnnnnnnnnnnnnnnnnnnnnnnnnnnnnnnnnnnnnnnnnnnnnnnnnnnnnnnnnnnnnnnnnnnnnnnnnnnnnnnnnnnnnnnnnnnnnnnnnnnnnnnnnnnnnnnnnnnntcactatcaacaaagaaattttataaaaaaaatgcatacgaaacgggaagtcaattcataagaaagtatgtacattattggaaagttaaaataaattactttgagaaaaatatttttctctgttatgttttcattgaatctatacaagaaatacatcaccaacaactgcaagaagaaaaaactaacttttacctatgcagcttacaaataagcataataaataactgttatccagtaaattttgaaatcattgctccaatgatgcaagagcatattccccttccacaatgtgtgcacatatgaattattatggcatacattggacagttgacatattgctataaaaaataattctttcctaataaattaacctatttcagaatcaatcacaattaattgcttattaccattaggtctttatacattaaatggaattaccgcgctgctaattcttttagctacaataactgcgtttctaatttgctataatggctatattgttatatttttctcactcctattgggcctctatacatttaattacttatgaagttgggtatctatattaataacaattttttcaatgaacaatagatagatgcatgtagtggctaattaagggtttatcatgactatattttcacattagtctagaggatgaaagatacaatttgggtaatatattaacttaattggatgcacttgcttttaaatcacattatactctaatgaactctactttacatgagacccagaggatctcacacattatgaccatacaatttgtatcacgttcacaggctccaaaatattcatttgatgtaaccacaaactacttacgcattgcatgctgttaggcaaaatatgatattctttctttattgtgtcttactctaactaaaacctaaccaaataagcaatttttcacatttttattttgttggggggaaattcattgacttggtgttagaatgtctttagagattccatcccctactgcatctcaattatttgcgttgggccttcacctcaagttaagcacaacgaattacttttcaaccttaatttatttttattaatctaataaaatcgttaagtttttgctaaagttattgatacatgcggggaacttataagcccttctttttctatgctatgtaaatatcttgatagtgatttattatttgaatttagattttttctaatttttacgacatcttaaattaaaaaattacaaaatttaaataaaaaaatattcctaaaagagcaaaaatctccgttgagtaggacatgtacacatgggaagggccaaggggctgctagttccttatctcaatcatgttcttgtctttttattaattttcatttgaaaaaacaaatacaaatgcaatcattgtcattgttttgattcattcatcaatgcaatatgcatcacaattcacaaggcaaggtgtgatggttgattaggaactccttaacttttaaggttgtctttttcactactagaaaaccagcttttaacatcggttattttcgacatacaacatcggttccgacccgatgttgaatcaggcgatgttaaaagtctagaacttaacatcggttcccaaaaccgatgttaacaatagtcaataacatcggtttcccatcaataaccgatgtggacatatgaaagctgaaaacgttgaaaagtagctacatcggaaggcaacatcggttctaaggtaaaaccgatgttaacgaagaaaagcaacatcggtttcatttgaaaaccgatgttaacgaacaaaacaacatcggtttggctgtcccaaccgatgttaacaatgtaaaacaacatcggtttctctaaagaaaaccgatgttaatgaagactatcaacatcggttttgcttacagaaccgatgttgttgtgatgttacaacatcggttttgttcttaaaaccgatgttgttatatcacaacaacatcggttatgtaacaaaaccgatgttgatttgtaggttagcatcggttttatctacaaccgatgttgttttttaatttttttttatatattttgtctgtttattggattttgacagttcttcaacctgaaaattacaaaatccagatccagccaattcagtatataaataatattccaataataatttggtataattattttcaaatgtacatatttgattttcctaagctatatacaattgtttgcaaaatccataacatagaccacctagcctactactaatacatcttctctaactttgaggaaatatttcgcccattcgacccttatcgccttcaacctgtcggcctccaatggtctttgatcagtgaaaaactgcattacataataaaacatgtaaggcttacataaagaaaacaagtaaacaacaacaatttgttttgaattaggcaacttattaccgtgtcccagctatctgtgaagctcccttggactattgtctgcatccaatgcatgacataatagccacactcagtgcttcctgtttgcttattacactaaattgaaaaatacagtcaacgttaaatggcaattagcgtaaatagtaatgaaaattactagcattttgggaaccatgatttatgaaaacacttactttaagcgcaatccatttagttgtagcctttgatttattttctggagagtcatggactcccttcaaagcactgtttaagacaaacaagtatgcaaagtgtacaagttatctttcaacaatagaaacaacgtaaatatgttagaaattagaacctacctgttaataattcccttaaggtagttatcaggcctgttatgcaacgaacaaaaccaggcgactacattggccttcggacatataactaccagttgccaatgtgaactgcattgtgaaaacaaggttattatactgcatacattaatgaaattgtgattaacatttatactgacccattcaaatacggtgcaaggtagatttttttctgtgaagtctgcatccatttcttcatatagtcctcaacttgaaattgagattggccagatctctgtatggactgtggctcgaggaaaccgaacacatcggcatgatcggattacagacttaaatgactcatatgcctattgtgcagtgagaataaagtcaattattgtagaatatataacaattcactaaataatgctactcaattgaaagagacttacagcatccacaactgtataacagagatgtttagacattgaccaccatggatgatctccgaaagatcctcatgcttgatgtacaatgggaagttgtcattatgcaccccgaacatcagcgggtcccatggcacctggaagggtctgaggaacagatcggggatggtcaatgctaaatggtacaagggatcagaaacacgttccagcttatctacaggttttgtcggtcccttgggttcttggttatcctacacagttaacaataaatggtgagcgatcagcttaactgcatatgtgacaaatcaatcgtaattcataagaaatcagtcaaaaatcaaataccttagtcaaaattgtatgtacaaggtgtgtcggccaagcaaggaaagtgttaagtgcctgccccactaactgaatctcgtcagtgggaacagggacgcgagcgtctccatcgcgtacttcctcaacactaacctttacatgatcagcggcaagagggacgccgtgcacagtcgtggatccctcatgaactctgccaagggcaacaaggcggggaggattgtcatccacatacaacccacgcctatcagatgcatccgtgtctcgatcattacccgagggatcaacacagcttaccttggtgctgacacgggcaccaagaggacacgactgaacctccggaggctgcatggcaccctgagactggatgtgggactgcagctggctgaagctcatcatcacctgctgggtgactctctctgtgatcgactgtgtaagacgatcagtgatggactgctccagctctaccctgatgttgtctttcaggcgatccaagtcttcaggcgccatggatgcagatttggacttgcgagaggatgatggggccggtccgaagtactgagtgatcgtcacaccagctccagcaccacggacacggccaggatgctcgggtcgtccaatggcagtagtaaggacatcctggcgaccactggcaacaaaagaaccctgtgtggattgctcttccagggaatcctgcaataaaaattagttgggttacataattagtcacaatttgtgagaaggaaattaattaaatgtgtatgaggttgttgtgtgacttacaatcctctcagcaatctgtcgtgccgcctccgaagtcatctcgccagtcttcttcgtgcgagcaagcttccacttcacgtgccggcgcacaggggacggaggatgaatgacggtgtccgtgctgtcatcacgagttgctgcctccagttgcttcttttgtttttcctccatcaatctcttctctagcaactcgtaacccccgcgtgacagcacgtgaggtgcggtgttttgcttttggattgcctgggccttctttctaacatcctgttacaggtagacacatagggttagcaaatagttaacaatatagcagcacaaatgagaacttgtaggattttgtaaaacaacatacctcccaggaagctgctcgtcgactctgacagaattgggtccactgttcgtgactgatgccgtatttactacatacagcgtcggcatcgtcgtcgttgcctcctgcgaggacccatttccgcgtcaagtctgatttgaattgcctccaccgctcacccacggtctgcagaatcttcctctttgtccgttggtcggacgcttcagggatatcaaattcagcctgcattaaaaggaagttagttctcaagttaagctaacatgaacaacattttaattgtgtaatgctttaaattgtaatacctgaatgtcctcccaaatcaagtccttctgcactgaaggcacttccttccaactaggaagggtgatatccaccttgtctctggccacgatcccaagatatgtccttaatttctttgcctgaggaccatcagccttccctgtgctaggatccacatggaccaccggtctgtcagcaccaggagctctagtagccagtgacctcagccgtgttgctttcctcgtcttcttcgatgtagtcgacgaaggtcctgcctcaagaggaggtgcggagtcagcatgagtcggtgctgactcaggaggaggatgtgctggctcaggatgaggaagtggtgactcagcacgcggaggggagctgggtggtgtagtcatgatcctgtaaaacacaataacacagatcagtcaagttaacttacaagttaagttacaagaacacatatgaaattgtacgtacaaggcgaaaatagttaagaaacaaaaattacattagctgatgttaattaattctccttcatcatgatcattacgatttgcatgaacatcgtcaacctcgttttctgtgttgacattagctatttgtgtagagaaatgaggcacacttgtttcgccggttgagtcatcgtcgtcaacattaatgccaatggtttttccgtgtagtaccactgaccacctttcgtcacacggatcttgtacatagaagacttgtttagcttgttctgccatgatgaaaggttcatcttcgtaagctagcttgttaaggtctaccaaagtaaatcctacatcctcggttcgcacaccactattgacattaacccacatgcacttgaaaacacagacagagaaagtaacataattaagctcccatatgtcatgaatgactccaaagtaaggcaatgacgccaaacgtggattgtcatcattgacagtagcaaagtgctgtgactcagctcttagactaaccccactgttctgcatggtgctcttatcatcttgtgctttggtatagaatgagtacttgttgatatcgtaccattgccaacttctcacatttctttttgggccatctgccaacttcctcagtgtttcagatgcagattcatcagcaaatattgtatgtttaaaccaattcaagaatgtcttgttatgctctttcaacagcctattcttcgtcattcttggattactttccttaagtagtgcttcatgacgaacaatatatggcagcacttcattactgttattcaagacatacaaatgagcttgatacaattcctccaatgagggcgttataacatgtagccctcgtgtaccttttcctcccactctgtcatcatgtcgcaactcgggaagaccaataggttttgctttctgaaggtactctgaacaaaattcaaccgcttcttctgcaatgtacctttcaactatggatgcttcaggacggtgtaggttttttgtataccctttcaagatcttcatgtatcgctcgatcgggtacatccaccgtaaataaactggtccacatattttaatttccctcaccagatgaacaagtaagtgaaccattatgtcgaaaaatgagggaggaaagtacatctccaactgacacaggataattgcggcctcttcctccaagccatctaactgtgcagggtccacgactttcgtacaaatcgcattgaagaaaaagcacaggcgacttatagcatgcctaactttgttaggcaaaatgtttcgaatcgccacggctaacagttgttgaattaacacgtggcaatcgtgagactttaatccaactagttttaaatccttcatctgcacaaggctcttaatatttgaagagtatcnnnnnnnnnnnnnnnnnnnnnnnnnnnnnnnnnnnnnnnnnnnnnnnnnnnnnnnnnnnnnnnnnnnnnnnnnnnnnnnnnnnnnnnnnnnnnnnnnnnnnnnnnnnnnnnnnnnnnnnnnnnnnnnnnnnnnnnnnnnnnnnnnnnnnnnnnnnnnnnnnnnnnnnnnnnnnnnnnnnnnnnnnnnnnnnnnnnnnnnnnnnnnnnnnnnnnnnnnnnnnnnnnnnnnnnnnnnnnnnnnnnnnnnnnnnnnnnnnnnnnnnnnnnnnnnnnnnnnnnnnnnnnnnnnnnnnnnnnnnnnnnnnnnnnnnnnnnnnnnnnnnnnnnnnnnnnnnnnnnnnnnnnnnnnnnnnnnnnnnnnnnnnnnnnnnnnnnnnnnnnnnnnnnnnnnnnnnnnnnnnnnnnnnnnnnnnnnnnnnnnnnnnnnnnnnnnnnnnnnnnnnnnnnnnnnnnnnnnnnnnnnnnnnnnnnnnnnnnnnnnnnnnnnnnnnnnnnnnnnnnnnnnnnnnnnnnnnnnnnnnnnnnnnnnnnnnnnnnnnnnnnnnnnnnnnnnnnnnnnnnnnnnnnnnnnnnnnnnnnnnnnnnnnnnnnnnnnnnnnnnnnnnnnnnnnnnnnnnnnnnnnnnnnnnnnnnnnnnnnnnnnnnnnnnnnnnnnnnnnnnnnnnnnnnnnnnnnnnnnnnnnnnnnnnnnnnnnnnnnnnnnnnnnnnnnnnnnnnnnnnnnnnnnnnnnnnnnnnnnnnnnnnnnnnnnnnnnnnnnnnnnnnnnnnnnnnnnnnnnnnnnnnnnnnnnnnnnnnnnnnnnnnnnnnnnnnnnnnnnnnnnnnnnnnnnnnnnnnnnnnnnnnnnnnnnnnnnnnnnnnnnnnnnnnnnnnnnnnnnnnnnnnnnnnnnnnnnnnnnnnnnnnnnnnnnnnnnnnnnnnnnnnnnnnnnnnnnnnnnnnnnnnnnnnnnnnnnnnnnnnnnnnnnnnnnnnnnnnnnnnnnnnnnnnnnnnnnnnnnnnnnnnnnnnnnnnnnnnnnnnnnnnnnnnnnnnnnnnnnnnnnnnnnnnnnnnnnnnnnnnnnnnnnnnnnnnnnnnnnnnnnnnnnnnnnnnnnnnnnnnnnnnnnnnnnnnnnnnnnnnnnnnnnnnnnnnnnnnnnnnnnnnaagcttctgtcactccacccatatttggccttgacattcacaagatttaacaccgcagacaacagtgtcaatgactccttgcaccctggatacaacggcttcttcgaatcactttccaacgcatcatacataggggcatgtgcttgcttaaatgattcatgtcccagatcacgaatcatatcatctaatcgatctccgatgtcgacatcaggcggttcagtttgcaagaccgtttgcgtgtctgtcaattcaccatgccatatccatgtcgtataagtcttcttaatcccatcgcacagaagatggtcgcgtatgtcatccagtagttgccgtcttccattcaaacaattaatacagggacacaaatattttccatccccatccggtcgacttctttcggatgcaaatttcaagaaatattcaacgccttgttcatagtcaaccgtaatgcgacttgcattcatccaagttcgatccatgtcactaataactctggcatactcacaaagttatttcatgcatgaaaacctctcttttttcattgaaggtgtgaccctatcccattcaagaagacacatttttatagtatattcatatgtatagattgcgtttcttatcttaaatttgacgaaatttcggcagcatttcgctttgatctccgaatacacgacatgaaagcggtgacatgagttccaccacagtcaagtatgcacccggagaacaaaatgaaatgcattgtaccgaaatttcatcaaatataagaaaagaatcacaacctacacatatgaatatactaaaaaaatatgtcttcccaaactgtccgaacggacaattcaagaatcaatacaatgattaatccaaactgtccggaagaatcactgtaatgaatctcaaacgggaaactaaggttcactcatcatgaacattaattgtacaaaaaaggcaacattcaaacgacaaactaacattcaaaaaataataatcaaattcgtaagtacctgcgatgacggtcactgacaatgtgcaaccacaaatgaagtgatgacgatggagagtagaaaacgacactaattaaaagcccacactgcagatggatgctctaaagctgaacaaaggatagatatttgttaattttctgcgaaactaacaaacaatataggggctggttaagaggttttctgtacaaatttggctataattttattgttttacaattcctatatagaagccattggatgtcaatgtaagacttccatttaagccactacaattgattaacccatatagaagccaatcacaagttcatacattgattggtgcatacacaataatacctttcaatactactcttgcaatagaagccaatcagaagttcatacattgaataaaatattgtttgtcaaattaaaagcatagtacctgagagggatgcgccaaagcaaaatatgggaatgacaaccaaataatgggaacctatcaagcgactgagccaaatcaaaatacaagcattagaagtagaatgtttgtaaatgtagtcaatattttatagtaaaatgtgtttgttcttacgcagggaagagatgcagaggatcaatcaatataatcttgatacaagtctcagataatcgttttgtaaacctgcaaacaacatgatgacaatatcaacattactgcaaataaattaccatatatatttatatgatcataaggaccagatcacatcattataggagtgttcaatgtcaagggttgcgctattgaataaattaatgctatgtttgtcatatttactggagtattcatcatgaacttgggtttcatttgagtctgtaaagcaaacacatgtctactagaatttggatgttgatgtcacatacacacacatctctatatgcaataaatgttcttttcaaataagttctacaacaagactatttgttgccaatacatggaatgtgtgtgtgtgtgcgctatgtggctgcctatatatcaaacaagtcctgcccctaattcctaaaaatgaccaaaacttgtttgttgtgtcacaacatagaagatgtgggcctcaaagtcgtttatttgtggagaactcatgtctacatggactgacccttgaagagttttttttccatgccatgtgtggtatggaaggtcagcagaaaaagttggaggctgaacctggtaggagatgatattatggatggtgtttggaaggtattattgaaagctatggaggacatcatggttgaatatgatgggacagtttacaaactgttattcaaagctatggatgctgtttggattgaaacacagaagttggattcccttaaaatgaaaaaaaaaactttcagaagttggttgcttcgcatagagctgaatcgtcaaatgatgatggataagaagttgagtatggctgacattgcagggaagattaacattgaatttgatgatgatttgacttgtatatttaatgatgacgatgcgttgatgccatacattagtcgaataaactctaccaacacaaagacttatgcctctacaacgctcctgtttctacaagatgacggtacactcaagccactggctatagagttaagcttaccccatgcacaaggggaacagcatggagctgtgagcaaagttttcactccagcacaagaaggagtatcggcttcggtgtggcagctggctaaggcttatgcagccgtcaatgattcaggatatcatcaattggttagccactggtatgacatccagaaaagtgttacaaacttaattctgtttctgttcttaataaggagaaagctatgtttcttgtgcaggttatacactcacgcagtaattgaaccgttcattatagccacaaacaggcagttgagtattcttcacccaatacacatgctcttgaagccacacttcacccaatgcatataaatgccttagctcggcacacgctcatcaatgctaaaggggtactagagataacagttttccctggtaaattcgccttggaaatgtcgtcctttatatacaaaagttgggtattcaccgagcaggcactacctgctgatcttcttaagaggtgagttcagttattgattttagtccaatctgttggagacaagtattagtaacatactattttctaacacacactctttattctagactaaaatttattataaaaaaacacaaaattatgtgagttactaggtctcacttctcattcatgattgtgtacttactaattttaactaatggtaaaaagtgtgataagaagaatgtgttactacttgctagtatttctctccataagaacatattaacatactagaattctataattcactgaatttcaggggaatggcaattcctgattcaagttgtcgtcatggactaaggcttgtgatacaggattatccgtttgccgtggacgggatagaaatctgggatgcaatagaaagctgggtgactgaatactgtaacttctattacacatccaattacatggttgaggaagacagtaaacttcagagttggtggaaagaagtacgcaacgagggtcacggtgacttaaaagataggcattggtggccagagatgaagaccaaagaggaactcattcaatcatgcaccattatcatatggcttgcttctgctttccatgcagctgtgaattttggacagtacccttttgctggatacctccctaaccgtccaacggtgagtcgtaggttcatgccggagcaaggtaccccagagtatgaggagcttaagtcagaccctgaattggcattcctcaaaaccatcactgcccagttccaaacacttcttggtgtgtcactgatagaagttctgtccaggcactaaaatattttcccttttcttatagtcaaatgtgagatatttctgttgatctcctaaatgatgctattaatagcccaggcataacatcataaaaaataaaacttatgcatcaaatgtaaccgcatattttacttaacctcttctaagcaccaaacagtaagcaaaacagtgtcacatctcagaatctggtgtacatggaataaacattgaagacaaaaaaggtaaatgcagcacacatcacatgctattagttagaaaaaacaaatgaagttatatccatactccatccacaaatagcacacatcagtccaaacatacattacttactgtcaaaatcaaacaaacttaccctagctactgatgctggcttgttcctgaaccatgactcttagagtttttaaaactggacaatatagccttattgtcaactaaacaaacttcattgacagcattgcacatcattcaatatacctccctaacctactagtaaactaaacaaatttaccctagctactgatgctggcttgtaacaaaatagaagacaatagaaactgtttgagcttccttaccagagatgggtcttcttgattgaagatggtgagcctttgatcccttaggtcacgaaggcttagaatgacagagaggcacctatgcatagaggcacgagctgagaatgacagagaggcaccaatgcagagattgaacaaaaaggaaatcagtgtttaagttgccaatataaatacctggagcgagaatggcagagcaccaatgcagacgggcacgaaggctgagacagcaacagtagttcacggcagccacaccgacagacaccgcgacactgagagtgagagcgacggtgagagagcgacggtgagagagtgagagagcgacggtgagagagtgagacagcgagagacagagcgagagagacaaagtgataaagaaagaaaatgggcgccaggaaaatatactatataaaatacacaacatcggttctctaagaaaaaccgatattattgacataaattcaacatcagtttttttaaaacttaacaaaaaccgatgttaacttaaaatagtcaacatcggttttgttcggtttttaaaaaaccgatgttaacatcaattgttaacatcggttttcatcagattttatgaaaaccgatgttaacatattgagttaacatcggtttttctttcataacttgaaaaccgatgttaacgaagtccatttatttacaagtttgccaccgcgttttcgttaacatcggttttttcaagaaccgatgttaaactagcgatgttaaatcctatttttctagtagtgttttcagtaggagagaagcggaaaaagttataacagcaatgaaaaataaaagaaatgcacactgtcattagttcggttgaactgaaagttacaatatatatataaaatatcttcagaaacaatgggattcacgagtgtaattttcttcacaaaactgagataaaagataaataaaaaatacaataaaaatgtgaattcgagtgttttcaaatttaaacttgttggctcataggatacgcacacgcgcagacaatattttttttatatttgattatgctgcatttcacatttgattattatggttagcaaaattgattatgatggagacatattcgaatataaaaaatgttatttgatacgaatagtttttttgtgcaatttacacaaaccttgttttgagcacttgttttttcattaacattttttttaatgttttaattatatttattttttaaaaaaatggtattaaagtacaagaagtcatgaaccgttcgtgcgtttctcgtgtttacgctattcatacgtactgaatagcagtactcttcgaatatttgttttttataatgcatgctcagtgagaaattgaatatatctttgtttggctagcaaaattgaatatgcgacttgctttttataactcatgcacaaccacaagttaaaaaagatattacactttaaatcattatataaatgtttttaactatattttttcattttattacctattaaatcatttaaatttaaaatattcacctcatttcatctcgatctgaacaatttcactttcatctctctttcattttttacactttcattcctaattttcttttctacctaagtgtgggattgtatacacgtataagtatcgattttccacttttccaaaaaaccaaacatgactagaaatggtatcgattttccacttttccacttcgaatatttgaaggatttacgttaaagttaaacagagatatacaaacaaatccaacttcatatggaggtaggttatatacacaaccccgccaatgatttagaaatggtaattatatttataggatactaagttaattacagacggtggacccaagcatccaattgtgaaaaggaatgctctcaaaggagggagagggatatctaacaaaaaaaagaagaaggaataaattctttttttatatttctattttgaaagttataagaaaaataatagaagtttattttaagtagtagattaaccaaagattcattttacataaatttagtattttaacctttaaaatgtactgaataaatataaatatttatttttatataatttaaatttgaaaaaatagataatgcatgtaaataaattagagttatcaaatcacacctcattatatataataaatttattaacttttataatatctcttaaaaattatattaatgatgttttttattgatacatgatcattaaatttttaaaatttatattaaataaatatttttaaatacataaaattatattataattaatatttatgataaataaatatttttaacatatacactacattttgaatttatgataaataatttatattatgatacaagattttttaattattaaaactttatttaaatatatattgaaattcaattttgaaaagaggacgagaaggctagattaaaagagataatcagttaaacaaaattaatttaaaaaaattactgtttattgttaataataaaaaatacattttattctctttaaataatactatttgtttactttgtgagttatttttcactatcattattattagatttagatccaaaccctaatcatagttcagaaataaacatctaactggagttttcacttttcagcagagaagcctctccgattccggcacggtggtcggcatagcatttttcggcggctcatctccgcaccgacgtgagttgacgtaggaatcgtaaaaccaacgggaaagccttatccggcacgtgagttcgttatctctttcccttctctgctgtgaaagtgttgagagttttatgagtgctgcatgtttcgatttatatttgtattttgtgaatatctttatcaatgcaatctataagtttgtttttgttcgtgattctagctgtctaaatgcttcttgttctgttctggtattggctttactatatacacatatattctgtctcctaatggataatacattagagctttttatagtcattgatttttcaccttcaagcttagaaacttctttgcaattatttaaatttgatttgatgtaattagccaaattatgccgttcctttcatgatttgatcacaccttagtagtatgcagttgttttatgtttgtaaaataggttaatatgatgtaggtacagataggtggcctatttaggttggagaaattattaggttgtcccggacaaccatgttgtggaatttgctacccgacaccgcgtacccggctcggcaccacaaccttctgctcggatactcgcgtactcggcaccgctcgtgcccggcttcctcgtacccggcagaacacttctcctcttcggctgggagcttcctctaccaaccgcaacactggggagtcactcgactcaaccctcagcaacaaacacagtaaatatgcagcggaaaacaatcaaacagtaaacgagagaatagatagggagaatcaacacacaatatagcttaacgtgggagaaaacctccaagaggaaaaacccacgggaccacgtccagaaataatccactattcagaaataatggttacaaaaccgctcgacagccacctgccggagccactctcagcctcgcttacaacagaagtgaaacactctcaacaagcagctctcagctctcggagacactctcgacggctcactaaccggagaaacactcactctctgttttcgctcagcctctcactgccgcaccttgcgtcagcctctgaaatcctcgtcgtctctttctcacctcataatgagagtatttataagagagacatatttagggatttaccctaaaaggaaatgggccaggacactgccttgggatttgggcccaatagcattggaacggaatatccaacaaaccacctctcttatctatggttcttaccaatttttaggcgacatgcatccaagtttttcaatttaagaaaaagaattaacaacactcgattatatgtcatgtagagattagttgaaaccatgataatctagtaatacctaatcatttatcatgatggtggtcatgtagagattacaatggcattgttatctggcattcttatgatgaaaggcctattggcgtacttatgcttatttggcctacttaagctgataagttaactaaccttagacagtcttttagacctggccagacttttaaacaagttaagccaaacctaaaaagaggctatgcaggtaaagaggtcaagctttgtaaataggaatgccaagtttaacttgatctgacatgtttctatccttccttggaatgctttttcttattttgccctcttttcccttttatttttgtaaatttgtgttttcctatgttactcactttcttcaattcaccatttcactattgcatattatttctctttctcttcctacaaaacccccatatcaaagattggaactttcaacaccattgaaatttatgaacataaaatacaattatccatttgtttcaaatcatcaataattgctttttttgggtgccgtgacagatatggcagataaagatgaagaggctatgccaagggacgcaaatattgtgaagtctttgatgaaatcaatgggcgtggaggactatgaacctcgtgttatacacaagtttcttgagttatggtatcgttatattgttgacgtgttaacggatgctcaagtgtattcagagcatgcaggcaagtctgaaatcgactgtgatgatgttaaggttgctattcaatccaagcttaacttcagtttctcgcaaccaccccctcgtgaggtaatattagtaatttgccacttttcaatctccttacccaatggttagattttctttcacatccaaaaagaaggaaaattattttgtaggccccacctttcaaacaacttgccaagcttggcaagaaaatctttcaaacaaacaagccatgaagtctaggcgtctattactacaacttaagtaaaacctattagaagaaaacagttcagttctgttactttctgacaatcatggtactaggacctgtaactaacaatattaatctcagcaatagatttctactttctagatagttacggtgtcgtgaaatatttgcttgcctgaaaggatccctgtccatttggtgacacacaataccatctgtttttttttccttcaagcaatggtatgtcatgtcttcctgaaagattgtttaatgtaatcacttggcaggttcttctggagttggctcataaccgcaacaagataccattgtcaaagactatagcaggaccttgtatccctcttccacttgatcaggacacattaatcagtcccaactacatgtttgcaattccaaaccaaaggcctactgaacctatagaagaaacagaggatgaagaagctactaatactattcccaacccctctcaggaagagcagattaatttagtctagctcacacgtaacaaaaatctataaatttttagtagcttgttcaatttatttattctttgtaaagtctactgggttctgaaattgaaacaaaattgtttccaaacggctcccctcttgtggtcagaagtcctcgtgaacacaatgagatattgatcgaaaacttggtgaatactgtgtacctttgttttgtacttgatagattgatctggctgcatcatatgctgtacttgagtggtttattcaaaatattgatgatgcgagatgaaatcatattctgaacgtattgcttaagctttcatagttatttatatataacagagaccttcaagaatcatattctgaaacatcacacatccatctacagacacttcatcaaatacttttttggggcatcaatgagaatgaaacaaccacacaacgtgaaagcattgtggcaaaaatattagaagagaagaaaatgagagttcacaaagctcactcaatatttcctagcaatatttcaaattctgctttacacaaaaaggaatcatcaaactttgcttgaggcttcaagcaattcctagcaaattccaaatactttgtgtatcacactgaaaaaaaatataaacgaatacaaagccatataatatagatcataacagtcatgatcgaggcctaaaataacctaaacttccctaaagcttgttcaagacagtgctgacaagtcctttgctggagaaagaagagcaacagcagaaagatccgagttacagaatttcttgtaaactgccctaagcttacttcctggtgcagcagcatgaaggttgcccatgattttggcgcaatccctggcatcaaaaataaacaagagtcacttcatgaatgttgaaaaaacacattaactacttgcatttttaaaataccaatttgctggtccaagaaaatattaaccttagttgctcctcagagtagcctgtgtagtgcatcaaagtgtttgtccagaaagggctccttccaagggtacatcgagccgcaaagacagcagaagcagcaatcaaagaagggcggtacaatattacagtaggataatgcatcaatccaagttcagcaagaaaaaacaccatgttctccatctacattgacgaaaattaggcatattcatcaggctattccactctggaatcttttaaaaaaaacaaaaacttaacaaccaactaccaaaatatacctctttgtcagatggagtggaggctttggtatacctaaccaagaagtgatagggtgttggaactgttaagtaccattcaagtttcctaaggattgttttctccatcatcaacacttgttcactaacataagcattgtctgatatgcacacaaagtcattaacctgcaaacatacattggaaatccacaccataactcataagtaagcactttctcaaaacatgatccataaatcatcatagaagagaaggaattccacctctggtgcccatatctcttcatattttgaggctatcagcattgagctgatgccaaccagctgaagctcccttctaggcacagccttcacagacaggaaccgatcgacaatgttcaaggtcaaataaagagtttctggcatgagctcaaacttcctatgcacttctaccaaccagtccacaaggattgacctcatcttggcattaatatctggctgcgaacccatgtagtcatgcacacaaccatctttctgtttcatcaaaatcaaatacatgtatgtataatataagaagtgcataggaaaaggggattatagggattaaacaaagaaaaaagcatagagcattacttcagtctctttgtaaaatttgtagatatcatcgatgtactccgctgctgccaattcattgtccatgtcagttgcatcaatgttcaccacaaaatcccttggaagtccacaagcagcctgaagttaacaagctgttagaccatgtaccagaaaaagggcaacccacaaagtcccaaaccacattcagaaaaatgaagaaaaaaggatcaaccttgcttctagcagagaggacagaactgaaggccttggcattcttcatggaagatttttccctcgccttttttcccttcacagcttgcttttcttctgattcatcatcagagctaatcacaatcacttcaggttcttctttaggcttctttgctgcttccacctttctagcaggaacaaaattcccaacaccaaccccatcagctaccactgctcccttgttcacttcagtgcttaatttctggataacaaccattcatacagatttagagacacatccgttaccaaaaagaaaacaaatttcttcgaaaatcagataggtaaaaactaaaaagtcctaaaaaaaatcaggggaaagagaataacaaccttgttcttttctgttgcggcttgtgcattagccaatagttgagcacgaaagttcctagtaaaaaagaaaagagcagaattaggcaaaagaaaagagaagaaaaattatgagagcttaaaaaaacaaaacatttcaaaagaaaagaaaaaagaaaaaaaccttgttacaggtttagacacgttaattccatttccatggccttgtttacccacgagattcccaatatcctgtagcacccttctgtttcttccttcaccacccttgtttttctgcttattctcatcaccaactaaaccacacaaaaaaaaaatcacaaaagggggattttcagaaacgaaaaaaataaaaaaccaaactttatcaaaacaaatcttgaaacctaaaacattcaaacatttatcaacaccggtagcaagaaaacaagaaaaagaagaacaaaaaccattgatgggttgttgctgttgttccaatctggaagccatgataacactttgatgcggttcttgagacgttgacccgaaaacaccgccaagagtcgagaacagcgacgacagaaaaccctgaagacctccgttccgcgcctctcctccgccgctcacgtcggttgtcgccaccgcggaatcaagcactgtgtttgtttgtagttggtagcaaccttttttcctctctctcttttgcttctacgccgaatgtacgaaacgaaagtatgaaacagtgtgttgtttcttggtttctttgttcctttgagaaattgaaacgtttgggtctacggctatgtttttttatacgacaacaccccacctccaacggtcgattctatattcaatcttgaccgttggattctctttggcatcaaaggctactattcgtttattcactttccttgcgtttttttatagccgttactctcacttctcattccctgagtttaaccgctcctcctgcttttgctaccattgcatcttcttgttcttatccctttttttagtactaacaaataaaaataggttctggggttaatagtaaaattagtccctaaagtgtgaaagtgtgatgataaattgatcttggaaaatacaaatctagtttatgtgaaaaaaatatgataaattagcattaaatttgtgagatcattatattattaagttataatgtttaaaaataacaataaattatattttataatcaattaaatattaaattataaaatttaaaaattaatttgtcattaaatttgtcataatttttgtatattcaaaaattaaattttaattcttcatctttatcatatcaatttgtcactaaactctttcaatttctcttcacttttgcactttatataataattaattattagtataatagtatagttatcgacttagtattatagaagtgtcctttgatttatttttaagttaaactaaatttatcattaaatttttacattaaattttctaaattgtttttaaaacaagtaagtattgaatatttctaattacatttattaatttgaattctttaaataatatgtttaaagctctaattaacacttgcttattttaaaatagattttagcatgaaataatgctagtatgtctattaatgaaggggttgacaagattttcaaaacctatgctttgaaaattaacggctagttggatcgaaaacacctgtaaatcagaccaatttagttgaaatagatcacataatcagtcctgagaataataagttaaaaaaatttaaaatcagtcaataatcaataaaatattacaaaattagttttaattagtaaaaaatggtttaaacaacattattttattttattttatttttcttaaaaatatgaaaatcaattttaggtgtttgttatgttttgcttatggacattgttgtgtattaccaaaatgtagattttaatattatgttatattttatgtaatttgattaaatttnnnnnnnnnnnnnnnnnnnnnnnnnnnnnnnnnnnnnnnnnnnnnnnnnnnnnnnnnnnnnnnnnnnnnnnnnnnnnnnnnnnnnnnnnnnnnnnnnnnnnnnnnnnnnnnnnnnnnnnnnnnnnnnnnnnnnnnnnnnnnnnnnnnnnnnnnnnnnnnnnnnnnnnnnnnnnnnnnnnnnnnnnnnnnnnnnnnnnnnnnnnnnnnnnnnnnnnnnnnnnnnnnnnnnnnnnnnnnnnnnnnnnnnnnnnnnnnnnnnnnnnnnnnnnnnnnnnnnnnnnnnnnnnnnnnnnnnnnnnnnnnnnnnnnnnnnnnnnnnnnnnnnnnnnnnnnnnnnnnnnnnnnnnnnnnnnnnnnnnnnnnnnnnnnnnnnnnnnnnnnnnnnnnnnnnnnnnnnnnnnnnnnnnnnnnnnnnnnnnnnnnnnnnnnnnnnnnnnnnnnnnnnnnnnnnnnnnnnnnnnnnnnnnnnnnnnnnnnnnnnnnnnnnnnnnnnnnnnnnnnnnnnnnnnnnnnnnnnnnnnnnnnnnnnnnnnnnnnnnnnnnnnnnnnnnnnnnnnnnnnnnnnnnnnnnnnnnnnnnnnnnnnnnnnnnnnnnnnnnnnnnnnnnnnnnnnnnnnnnnnnnnnnnnnnnnnnnnnnnnnnnnnnnnnnnnnnnnnnnnnnnnnnnnnnnnnnnnnnnnnnnnnnnnnnnnnnnnnnnnnnnnnnnnnnnnnnnnnnnnnnnnnnnnnnnnnnnnnnnnnnnnnnnnnnnnnnnnnnnnnnnnnnnnnnnnnnnnnnnnnnnnnnnnnnnnnnnnnnnnnnnnnnnnnnnnnnnnnnnnnnnnnnnnnnnnnnnnnnnnnnnnnnnnnnnnnnnnnnnnnnnnnnnnnnnnnnnnnnnnnnnnnnnnnnnnnnnnnnnnnnnnnnnnnnnnnnnnnnnnnnnnnnnnnnnnnnnnnnnnnnnnnnnnnnnnnnnnnnnnnnnnnnnnnnnnnnnnnnnnnnnnnnnnnnnnnnnnnnnnnnnnnnnnnnnnnnnnnnnnnnnnnnnnnnnnnnnnnnnnnnnnnnnnnnnnnnnnnnnnnnnnnnnnnnnnnnnnnnnnnnnnnnnnnnnnnnnnnnnnnnnnnnnnnnnnnnnnnnnnnnnnnnnnnnnnnnnnnnnnnnnnnnnnnnnnnnnnnnnnnnnnnnnnnnnnnnnnnnnnnnnnnnnnnnnnnnnnnnnnnnnnnnnnnnnnnnnnnnnnnnnttttttaattttcgacaaaatagtaggttgtaaaaactggcataaaattcccaagtagcaattgagacaatataaaatcctttttctccactaatgacttaccgtttttataattgtttcaaatgctaaagaattcagtcatgaattttgtaaggttagttttactaattaatgccttaaagttaaaaaataaatatttttaaattattttaaaaaagtaagtattaaatatttttatatatttaatactttctgataaaaacttttactttaatgtctttaaataatatttttacagaattcattaattaatatttactaattttaaggaaaatataaacataaaataattaatatttaccattattaatataaaggagatgtatctaatcagaaaaataaattattataaaatgacaagaataaatttgaattataaaactataagtgaatgattttacatatttttcagtttatattaagagtatttcttcaacagaaagagatcaattcttcttaaattaaagatatgaatattgaaataagaatgggtatgatctcttcgtcttttaattttcataatattagtacgtagcacatactagtacaattgaattttaactaattgacctgttcaagaaacctaactcctagaaaaaaattattaaaaaatgacaagaataaatttgaattataaaactataagtgaatgattttacatatttttcagagtttatattaagagtatttcttcaacagaaagagatcaatccttcttaaattaaagatatgaatattaaaataaatatgtgtatgatctcttcaaatcaagtcttttaattttcgtaatattaattagtacgtagtacgtactagtacaatcgaatcttaactaattaacatgttcaagaaacctaactcctattaatcaattaaatacgtccgtttttattggttaattaaatgggtttttatatctgtccctaattaaaaccggtcaattatatctccatgaaagacactagctaacaacaagccacactcttcaagggttgaggccgggaacacacattttggcatcaaatttgacaaacatagggcaaatgtgaccttgaacgaaaaaaggaattttgtaatgtttctaaacaaagaattaaccggatttgatcatccaaagattgaaaacaattatatgcagctgaaccttcaaccttgtgtacatggtggaactgattttgttcattattttaattgggggcaaatattttctcaaacatcaaattattgtggtcattacaactgctaaaaagttttcccaagaaggaaattaaccaccatatatatatatgccgaaaagcagaaagccggaaactataaaacaaaatggggatatcccaggcacccaacaagttcatatttgatcaaatcaaaaatcggaaatgacaaatttaattactgatcaaagattcagaattaattactaattaactattgtcataattaagtggctagaagttatttgcattaagaaattaaaaagtcatactttacgaaagctatttatcctgtattgataattaaaccttttaaaaaattaataagtaattaattttgagaggaaatcgtcactttttttattattaaaaaggctaataatgcatgtgtagctttgtgaggaaaggacgtcgcgtaggtgcatgcatgtgataattagctggataagtgcttttctaagacagtcatgtgacgattgacgttgaagtcacgatgcgcctatgtacgtgtcatgatttttaccattcccattcgataaaactctatttagtcaattgtttagtagacaaaatttaggacactttgtatatcccaaaaaaataattattttctttgtagttgttttttactggagatggaatatcgaattaaatagagaatataacattggcaatgtttagaataaagtatctattttttatcttaattatttattatattataaaaccaatattttatgtataattttcttttttgtgtgactatgatattagtgtgaaataattattaattttattgataataattaatttttattagagaaaatctagttatttttaatgagatatcttctctgatttttttttccttaacagtattcaaccttaatttcttgcttaagaaatctaatgccactcagacaaacaatacggtacaatcagtccctttagagcaaacacctatatattttacttgctatattcaagttttcacgttaatcaaaacacacaagataaatggtctgtttgagtaagtttatctagaagcacttctaaaaaaaataagagcaaaaagatgaaatgagtttttccataagtaaaaataaactctctaactaatttgtagaagctcacaaatataacttctctaaaagatgagatgacatctacaaattagctaatataatatttattttagtttatgaaaaagctcatttcattttttttcttcttacttttctcttctagaagtacttttagagaagctaacatccaaatatgtccaaacattgataccttaagaaatttagtttccacaatgtgtacatacattatagaaattatagtttacgtatcatattagtaaaatgaaattatagatttatgtatgaaactacattaattatgaaaactattttttggaaaatctgcggggtgggggaaccctcaccagacagtgaagaagggaaaggaaatgaggagtactactcggagcaagaaaagataaggtggaagggaaagtaaaatggcttaaatgaggtggacgtgagagtatttttggtgttagaaaactattagtgagggtccttttggtgttagaaaaatacaataaaaggaaggggtgtgaaaagaattaaaaaaagttgtcaaaagaaatggtatttttcttcttatcattaatgaattcgaattttagcctttttttatattattttccaaaagaaagggctagaatccacacattaagtgatgagcttcctacaccattcattatttctcatacaccattatattttttattttccaaaaatacccctggctgttctcttatatttgtcctacaccgttttcttcgttgactgcgctttcccttttgaaacttcactcacttcatttttttggccgttggttgttggaaacgctgtgcattggttgttttgggtggcattgtgttgatttcgtcggagttgtggcgtggtggtggccgtcggagtcgtgaagtggcgtcggagttgcaggtatgttttttgctgtcgtacggattgttcaatccgtatggtatttacggattaggaaatccgtatgaatcatacggattcggtaatccgtatgaaccatacggattaccnnnnnnnnnnnnnnnnnnnnnnnnnnnnnnnnnnnnnnnnnnnnnnnnnnnnnnnnnnnnnnnnnnnnnnnnnnnnnnnnnnnnnnnnnnnnnnnnnnnnnnnnnnnnnnnnnnnnnnnnnnnnnnnnnnnnnnnnnnnnnnnnnnnnnnnnnnnnnnnnnnnnnnnnnnnnnnnnnnnnnnnnnnnnnnnnnnnnnnnnnnnnnnnnnnnnnnnnnnnnnnnnnnnnnnnnnnnnnnnnnnnnnnnnnnnnnnnnnnnnnnnnnnnnnnnnnnnnnnnnnnnnnnnnnnnnnnnnnnnnnnnnnnnnnnnnnnnnnnnnnnnnnnnnnnnnnnnnnnnnnnnnnnnnnnnnnnnnnnnnnnnnnnnnnnnnnnnnnnnnnnnnnnnnnnnnnnnnnnnnnnnnnnnnnnnnnnnnnnnnnnnnnnnnnnnnnnnnnnnnnnnnnnnnnnnnnnnnnnnnnnnnnnnnnnnnnnnnnnnnnnnnnnnnnnnnnnnnnnnnnnnnnnnnnnnnnnnnnnnnnnnnnnnnnnnnnnnnnnnnnnnnnnnnnnnnnnnnnnnnnnnnnnnnnnnnnnnnnnnnnnnnnnnnnnnnnnnnnnnnnnnnnnnnnnnnnnnnnnnnnnnnnnnnnnnnnnnnnnnnnnnnnnnnnnnnnnnnnnnnnnnnnnnnnnnnnnnnnnnnnnnnnnnnnnnnnnnnnnnnnnnnnnnnnnnnnnnnnnnnnnnnnnnnnnnnnnnnnnnnnnnnnnnnnnnnnnnnnnnnnnnnnnnnnnnnnnnnnnnnnnnnnnnnnnnnnnnnnnnnnnnnnnnnnnnnnnnnnnnnnnnnnnnnnnnnnnnnnnnnnnnnnnnnnnnnnnnnnnnnnnnnnnnnnnnnnnnnnnnnnnnnnnnnnnnnnnnnnnnnnnnnnnnnnnnnnnnnnnnnnnnnnnnnnnnnnnnnnnnnnnnnnnnnnnnnnnnnnnnnnnnnnnnnnnnnnnnnnnnnnnnnnnnnnnnnnnnnnnnnnnnnnnnnnnnnnnnnnnnnnnnnnnnnnnnnnnnnnnnnnnnnnnnnnnnnnnnnnnnnnnnnnnnnnnnnnnnnnnnnnnnnnnnnnnnnnnnnnnnnnnnnnnnnnnnnnnnnnnnnnnnnnnnnnnnnnnnnnnnnnnnnnnnnnnnnnnnnnnnnnnnnnnnnnnnnnnnnnnnnnnnnnnnnnnnnnnnnnnnnnnnnnnnnnnnnnnnnnnnnnnnnnnnnnnnnnnnnnnnnnnnnnnnnnnnnnnnnnnnnnnnnnnnnnnnnnnnnnnnnnnnnnnnnnnnnnnnnnnnnnnnnnnnnnnnnnnnnnnnnnnnnnnnnnnnnnnnnnnnnnnnnnnnnnnnnnnnnnnnnnnnnnnnnnnnnnnnnnnnnnnnnnnnnnnnnnnnnnnnnnnnnnnnnnnnnnnnnnnnnnnnnnnnnnnnnnnnnnnnnnnnnnnnnnnnnnnnnnnnnnnnnnnnnnnnnnnnnnnnnnnnnnnnnnnnnnnnnnnnnnnnnnnnnnnnnnnnnnnnnnnnnnnnnnnnnnnnnnnnnnnnnnnnnnnnnnnnnnnnnnnnnnnnnnnnnnnnnnnnnnnnnnnnnnnnnnnnnnnnnnnnnnnnnnnnnnnnnnnnnnnnnnnnnnnnnnnnnnnnnnnnnnnnnnnnnnnnnnnnnnnnnnnnnnnnnnnnnnnnnnnnnnnnnnnnnnnnnnnnnnnnnnnnnnnnnnnnnnnnnnnnnnnnnnnnnnnnnnnnnnnnnngaacggtctacaagaagggacccgtcgtacttcgagtatgtggatgagttacactctgtacaaaatagctgttctaccccgaaacagtccagttcgtcttccgatgttctaatgaaaaaccggagggttccaatgctcaatcaatttgccccattcatgcagaaatttattgttgacataactgatgtaaaacctgatggtaattgtggatatcgagtaattgctgcctttataggttacggtgaagacgcttggtctttggtccgcaatgatctgctgaaagaacttgcacaatggactgatcaatatgtgttgttgtttggtggtatagataggtttgagaagatcaagcggtccctactagttgatggaatgtcgaaggtatgtttaaattgtgtttctttcacatgaattggggtaacgtaactctgtacaaacatgcatataatatattcgattaactgataatttgtaggtcacaatggataagtggatggatatcacagatatgggtcatgtaattgcatcaagatataacatgattgtagtatccctgtcactgcagcaaagtatgacgttcttccctctaagaagtcaaccgcctagagatccccgagttcatcgaattttgtgcattggtcatgtttttggaaaccattttgttcaggtaagacataacgtgtttgtttttcatatgtagattttattttgaagatagattaatgatttatgttgcaatttgatttatgtggcaatttgtttaaatcaggttactttggcagacaattgtcctttacccttgacggcatgtttgtgggatagtcattgtacccaggaagctcaacagtggccgtataattacattgatcgaatgcaattgtatattaaatccatgcggttgcccacggaatatgttgatttaggagatgtataaacactggtttaacaatgcaaatgtatgacttcattgatatataatgtgaagtagacaaaatagtgttgttgcatacattgctgttataagtaactacacaataatgatgaacatggtttctgtcatgtcgaataacaaaatgtaatcataaaataaatgtcaatcacgagcactggaaggcctcctccgcggtctgatagtccgtctagctcgggtgtacacaatgccatcgtcagtcacacctcgaagttgatgcaggatttgctctaccatggagtatgcatctgtgccttccgtaaccatcctcatgtcaagcatatgttggaggccctcagcagcacgttggcacacatgctaaaaaaaccaatggattatgaacaaggcaataaacgttaattcaatttcaaataaacaattttaagaagtccaattttaagaagtcttaccacggcatgcactggtctctggtaatcgacatcactgtgggactgggtatgggatggtgcaggatgggatggtgctggctgaggcactggtggtgctggctgaggcactggtggaatctgggcataagcctcctcataccgagctggggtcatgaatgggtgggaaactcggaagaaccaccccatgtatgcagcaccacagtgacctgcataatcgaccaactctccggtgggcaccaggtagtctaggaagtgggtccacctatcatcgaggtcttcaacagaaggaacatctgaggatggcagaggtggaatgtgctgaacatacccaaactgcctgaccaccctctccggtaagtacctggtcagatgaggaccccatctgaggaatccagaatacatcgagattacctcaaactccctgtggatacggtgcatgtcatatggtgtccagcatacatctgacggtgtcaacctatctatacgtctacgataggttgtcaccggtaaggccttcgtgctcttccacctgcaggcacgaggttgcctctcatcgtactgctcatccgcaacctcatttcctatactaggaaaatgctcatatatccagcactacaaatttaaaacaatacaagtcagcaaacaatgcaaacaacacattcgcaaccaataaactgtgataattacagacatcatacaaggacattacctgtaatannnnnnnnnnnnnnnnnnnnnnnnnnnnnnnnnnnnnnnnnnnnnnnnnnnnnnnnnnnnnnnnnnnnnnnnnnnnnnnnnnnnnnnnnnnnnnnnnnnnnnnnnnnnnnnnnnnnnnnnnnnnnnnnnnnnnnnnnnnnnnnnnnnnnnnnnnnagagatgtagcctgcaagatgtttcccgtgatgcttacatgcgtagctcaggtgctcatacatgtggacaagggcaccaacaccccatgcaagacctgcagcccgatcaaagtctctgaaagcctctaagaatgccacacctatatgtgtggcactcttgttggcaaacaacgtgcatccaacaaggtgaagtagatatgccctagcggcgagtatccactgtctcgactccaccttcgcataatacaaatcccggagccatgatagcctaacataagcaccgtgacactgtgtcgtctcagcggatgcctcctgtacagtcacatcgagcagctctaccaacaacctgatcgcgtcgccgatgtctaactgctcgtacgtgtcgaatgtgcccataacagggagatgcagtagtgatgacacgtcgtccaaggtcagtgtcatctctcccacgggcagatgaaatgaacatgtctcggggtgccatcgctcaacaaacgcggatagcaaccccctgtctccagtctccactgagcatccaatcaatggactcaggccggtagctgcgataaatccttcaatttcaggtacaggcttcccgaatttaatgaccttacggccatgggaagcaagcttcaactctggacgttcctgcattgaacacatcatttaaggtaaattatcaatggataagcaaatgactttcagctatgactatgtcattcaaaatctcaatacctctcctgcccagactcgtacagccacatgatcggcaaactcggtaagcaccgaagaatcttccggccctccggggaaagattcaccagctgtgtccatatcgtccatcacccggtcaccaatctccgcatcagtctcaggcacgggaggatcatcatgaatagcaggaggatcatcctgaatagcaacacctgccctatgacgacggacagatgcggtaggcctccgacgctcaggggcatcttcagaatgacctctaccatgtgtaaccgcagaacggtcgggactccgaccaacggcccgacgcactcctcctctcgtcctagccataatctgcattcacatagtgtttttcaggttttcatcttcaacaacaacatcattatatacagatttgtgtacatggttatgtatactactgtcattcaccaccagatgtcattcatcagttcagagcacaccaaaccaaacagacatcaatccataaccattacatgtcattcatgactagaaactacaccaaaccaaaccaacattggtacataaccaccacaagtnnnnnnnnnnnnnnnnnnnnnnnnnnnnnnnnnnnnnnnnnnnnnnnnnnnnnnnnnnnnnnnnnnnnnnnnnnnnnnnnnnnnnnnnnnnnnnnnnnnnnnnnnnnnnnnnnnnnnnnnnnnnnnnnnnnnnnnnnnnnnnnnnnnnnnnnnnnnnnnnnnnnnnnnnnnnnnnnnnnnnnnnnnnnnnnnnnnnnnnnnnnnnnnnnnnnnnnnnnnnnnnnnnnnnnnnnnnnnnnnnnnnnnnnnnnnnnnnnnnnnnnnnnnnnnnnnnnnnnnnnnnnnnnnnnnnnnnnnnnnnnnnnnnnnnnnnnnnnnnnnnnnnnnnnnnnnnnnnnnnnnnnnnnnnnnnnnnnnnnnnnnnnnnnnnnnnnnnnnnnnnnnnnnnnnnnnnnnnnnnnnnnnnnnnnnnnnnnnnnnnnnnnnnnnnnnnnnnnnnnnnnnnnnnnnnnnnnnnnnnnnnnnnnnnnnnnnnnnnnnnnnnnnnnnnnnnnnnnnnnnnnnnnnnnnnnnnnnnnnnnnnnnnnnnnnnnnnnnnnnnnnnnnnnnnnnnnnnnnnnnnnnnnnnnnnnnnnnnnnnnnnnnnnnnnnnnnnnnnnnnnnnnnnnnnnnnnnnnnnnnnnnnnnnnnnnnnnnnnnnnnnnnnnnnnnnnnnnnnnnnnnnnnnnnnnnnnnnnnnnnnnnnnnnnnnnnnnnnnnnnnnnnnnnnnnnnnnnnnnnnnnnnnnnnnnnnnnnnnnnnnnnnnnnnnnnnnnnnnnnnnnnnnnnnnnnnnnnnnnnnnnnnnnnnnnnnnnnnnnnnnnnnnnnnnnnnnnnnnnnnnnnnnnnnnnnnnnnnnnnnnnnnnnnnnnnnnnnnnnnnnnnnnnnnnnnnnnnnnnnnnnnnnnnnnnnnnnnnnnnnnnnnnnnnnnnnnnnnnnnnnnnnnnnnnnnnnnnnnnnnnnnnnnnnnnnnnnnnnnnnnnnnnnnnnnnnnnnnnnnnnnnnnnnnnnnnnnnnnnnnnnnnnnnnnnnnnnnnnnnnnnnnnnnnnnnnnnnnnnnnnnnnnnnnnnnnnnnnnnnnnnnnnnnnnnnnnnnnnnnnnnnnnnnnnnnnnnnnnnnnnnnnnnnnnnnnnnnnnnnnnnnnnnnnnnnnnnnnnnnnnnnnnnnnnnnnnnnnnnnnnnnnnnnnnnnnnnnnnnnnnnnnnnnnnnnnnnnnnnnnnnnnnnnnnnnnnnnnnnnnnnnnnnnnnnnnnnnnnnnnnnnnnnnnnnnnnnnnnnnnnnnnnnnnnnnnnnnnnnnnnnnnnnnnnnnnnnnnnnnnnnnnnnnnnnaatccgtacgacacccaacaccggttcgccgttcccattccgccatagtcgacctgcaacaccctccacagaccaccatctaccagtttaacaattaaataactcaccagggtcacaggaagcacgaagaactggaactggaagaatgaatgctgcggccgaagaactggaaccaccaaccaatggcaacggcaatggttgaagagggaagaagaagaacaaaggcaccggcaatggttgaagagcgaagaagaagaacaaaggaacggcaatggcacagggaaggagaggcaatccgaatccgtttaatggtgtattaggaagggaagtagtcgcggcagggagaaggagaagacggagagggagaacaattttttttaaaaaaagggtatatttggaaaatcactgtttattaatggtgtatgaggaaaataaaatggtgtaggaagctggagcccacattaatgagaagaaaaagtccatgaagaatgaagcggtggagattaaatgtacaacaacaccacacatattttgcctttaactatcattaaaaaaaaaaaaaaaaaaaaaactctagtccaaagtctttaactatcataattaagaaaaaaactactctagtccatagttcgctgacttcactcacttctaagttattttccatttaattagactactataactgcaaataatgctcttacctcatagaaaggtcatttttatcttagtaaaaatgatatattgttattagccactattatctatatatgacatgagcaaggttatgtagttttgatattttcaatcttgatttatcacgattatggatttttactctttcggtcaacctctttttttagattctcaagctgccatggataccaactttaaaactttgaaatgtgttaaatcactacattcagttaactaaatgttgttttagaaatttagactttgaaatagtaatatctcatttcttttctttattttttcatcaccaatttctttatcctaagaaactattttttattgatagcgaatttgcgtttgttctgttcactttttctaaaagaaagccagaaattgagctatttttttcttgttctttttgtcacctgctttctcagtattagattgaaaaataaaactaagattaaacatacaatttagtcatgtatgtgtacaaacctattaattaaatcagtcactatatgtgcaaccgtaaccgatttaattcctaccatcatacgttaattttgaactcttttatgcattcttgtctttatacgtatagttcattcttaatttaatctttatacatgtattttattaacttagtccatatatgtgtagtttattcttaatttaattccatgtgtaagtaaattgtattatgatatataccaactaatctttgcatagctcgtaatagatgtgagttttattaattcttttttctaaattaaaaaattcaattatatatcacatagaaattggttgagattgaaacataaatataggccggcaacacttgtgatggtttccaaagatccaatatgaccacttaggtctaagttgccacaatattgttctatggaagccacggactgttagaagtttggcccggtttttttttggtgtgatagtttaagattatctaataaataaactatcaattcgattccttaagcgtcaccctctctcctaaataactctttaactaatgaaactatataagtgattcctaaaatattaaagatcatcctacatagtcctcaagtattaaaaaattcttcaaaacattgcctaatgttagtaaagtatatcaattcccagtaaaaactaaattgatagatatttaatactttatttaggttctatttaattatataattttattattttaaatattatttaatattttattagtttgaagaccaacaaattaaagcacacctaggtaaaacgtaattaattaatttaacatgttttgtatgtagcagcaaatgcatccggccgccacatactgctaccatcgtgtcacttccttgtgccaccaccgcccggacccttcttcctcctcttcttttttatataagaaaccaccaaaactagttccaaacatcactagctagctactcctcatagaattaaaacaatcatatatatgtattcatatacctacctccatatattcatagagttaaaacatcccttctcttgtgaggattaaccatacaaaatgtccaagtttagtaacgataattattttttcatcattaataacattaattattttaataaacatgcatatatatatatatatatatatggaaacatttgtatatataagaatgagataatcaaatttgaacagtataattatacataaattattaagattaaattttaaaaaatcatatattttaaaaaaactcacatgttttttttaaaatagttacataataataagttttaacagtttatatttgattatactggtcaaatttaatttttttatctataaaatacatattcttctcaaataatatgtcttttcttatatatatatatatatatatatatatatatatatatatatatatatataatatagaaagtgtcgtctcatggttaatttaaaaatttcttgtagattcgtttggtactgaaacagttgagaaatggggcttagcgagtctctgaagctacatgatgaaaactcgaaggtggcagcgggtgtgagtgcggcgatgtgtttgatcttaggtgggatctttgtgtttatagtgtcttatgtctgcattcgtcttcgctcccaaacccatagagattagagacgtgcctgccgctgtcgccgtcgtcagcggccaagaaacggtcggcaagtgtcccgtctgcgtttactcgacggtgaagaaggagaatgtggcggcggaggagtgcgccgtgtgcttaggcgagtttgaagactgtgatgtggtaaagatgctaccaaaatgtgaacatattttccaccagcattgtattgatgcgtggttaccctcacacatgaactgtcccatttgtcgcgagaaggttgcgtttgataataatgtctcaatggaagaagaagaagaagaagaagaagtactaggtatagagtccgaggtggtagggacaacagcggaacctgaaactgttgtgggacccgaggaggaggaggaggaggacgttggacaagtgcactctgagtctgagtttgttgcttgaatcgtggtaggattttttaattccctgtgttggtgcattttaccaacattaattatgttttctgactaaattaaaactccggttcatttttctagttatgtttcgtttgtttatgaactttgtggattcaaagaaggtgcatttgttaacatatatatgagattttattaaagatggtgaaatcaacaatttcttttacaaagattaatggttaccacttaacaaaattattagaaacttcgtatctataaacattgaaaaaaaagaaagaaaaaggacgagtttattatctattaaaaaaagtgaccttgctataaaataatttaatattttgttttaaaaataaaaaatataaattaatttatgcttatttacaatcataaaaatcacttttttaagaaaaattaatttatgataagttatggaaaatagcttttgatttaaatcaggttttagattattttgaccaatcatgtttttttaaatgattatatttttaaaatctttcctggaaaataatgtttacatgttgtacatgtttaattaagagtgtataatgtagttacgtagagagtaaatgaccttaaagaaaatatatttgcctactagtcgtcgtgtagagataaattatatatagatgttgtccttaagaaaatcttaatatcgaaggttgaattagttgaattaattatgggattaaattatgaaaaattcgttgtatctannnnnnnnnnnnnnnnnnnnnnnnnnnnnnnnnnnnnnnnnnnnnnnnnnnnnnnnnnnnnnnnnnnnnnnnnnnnnnnnnnnnnnnnnnnnnnnnnnnnnnnnnnnnnnnnnnnnnnnnnnnnnnnnnnnnnnnnnnnnnnnnnnnnnnnnnnnnnnnnnnnnnnnnnnnnnnnnnnnnnnnnnnnnnnnnnnnnnnnnnnnnnnnnnnnnnnnnnnnnnnnnnnnnnnnnnnnnnnnnnnnnnnnnnnnnnnnnnnnnnnnnnnnnnnnnnnnnnnnnnnnnnnnnnnnnnnnnnnnnnnnnnnnnnnnnnnnnnnnnnnnnnnnnnnnnnnnnnnnnnnnnnnnnnnnnnnnnnnnnnnnnnnnnnnnnnnnnnnnnnnnnnnnnnnnnnnnnnnnnnnnnnnnnnnnnnnnnnnnnnnnnnnnnnnnnnnnnnnnnnnnnnnnnnnnnnnnnnnnnnnnnnnnnnnnnnnnnnnnnnnnnnnnnnnnnnnnnnnnnnnnnnnnnnnnnnnnnnnnnnnnnnnnnnnnnnnnnnnnnnnnnnnnnnnnnnnnnnnnnnnnnnnnnnnnnnnnnnnnnnnnnnnnnnnnnnnnnnnnnnnnnnnnnccatatatattagtatatgctgtatttttttttggatcggttgtgtatttgtctaaaacaatttatttttttatatccaaattatagctgaaaacataatatcacattagggtttggacatcatttcaggaccaactaacctctctacttgctaaatataatgcaaagtcaaacccaagtagttgcattgttttattgctatattgaaataattgtatgtgtagaattccaacactgcactaaataacgaaggtacaaccaatgctgtgttgttaaaggggtgacattttatatcaaaggatatgaattcatgtcattttcaatgtaacaaatacatctatttttcccaggtattttgattgataaaatatatatgacgaatagtgacaaaacttgagtttggtgcttcttgacaagttaggaaaacttcaataatgttcagttactattactctaaagacaaattaaggcaagttaaaaatactgaattgacttacggaccggctcaattctttctaactaaaagcaagtcatcatgaagagaataaattttgaataacaataattaagtcatttacaaaacaatcgaatattatatgttagtttgtttggtatgttttataaattttttaacaaattaaacggatcatcctttagaagtacagtagataaaatgctctagttttgtcaatatttcctcctattattttaaaagaacaatcaaaatagaaatgtcctacgaagataagatatgaacgattaggagttttccctttatttattccttgatattctaaaagcatcacttattatatccaaagtttataataatgaatgagacatctaaccaagatatgtcaccgacccaccgttttggctcattccacgtgtcaactatcacatggctatttttgttgggatccagttgaacagaaaaactaaattaaatgtattgaaaaatatgtaaagaaaacaaatatacttctatgacacaaattattgagagcaagatagagcagtgagtattttagtaattcagcagaaagtgagggcttcataaccactctggcagcacaagaatcccacattcttattctcttaagcttgttattaaaaaccagtttcactgtgcttcatacattttcacaaaccccaggaagaatggaacagggaagaagaataagctcttttggtcctatgttctcaattgttccttgtcttctcttcctttttttctgtctctcaggatctgctgaggcctacaagaattacacagttggtgactctttaggatggtttgacaatactgaaaagtccaatgtcaattaccagaagtgggctgacagtaaagaattcagcttaggagatttcctcagtaagtttcttcatcatcatgtttttctgcttacaatccttgtttgtgtgttttgttgttgtattcgaaagaagtgactaagtagaacttgaggaattttattgttgtcaatgtttttagacaatttcttatggcatggttgttcttgtttcatttccttgatctgatctccaatttgcatttatctggttttatttgactgaaactcaacactactatgatgtctaatcagatttaggaaaaatactggattggaaagaccgatcatattacatcactcatcccataacttttcaatgtttttatttttttaactttttttatctttgcttttaaagcaatcaaagtatctattttctcttcacaattcctctacccgtcactatgatggaggagaagcaaaactatatcatttacttatatttttattttggaatttgttttacataacatacttctgagtgtcacaaaaaataggttggcttcaatcatagtactattgtgtgttgtttccctctgcagcatatatgctgttttttgggtacgttgtgccatattcttaatatattaatgttagtcgatttagaaaaagttaggcttaaattggaagtactaagagaaaggcatcactactcttgttggtatttttatggagtctgccacacgatccacaaccgttagtctcaactaaagtattcacccttccatttgacgcaacacaatagctaacaaagaatattactgttagttaccatttgtccctttttgggtagaagggaaaaaagaaaaatccgatacccaaaatgacttgtgacaactactagtagtactttttattattctttttttttggtacaaatattctgttttgatactctgattgagtggtcactcaattctactagtttaatttttcttttatgtaaaacttgtaataataatattctgagacgaaggaaaaagtgaggaatgggatttgctttaaagctattagtcaaattgaagctaaccacaaaccattataattataattggcgatgattaagctatcatttaataaagccatacgttttatgaaacataaattaagaaaaagaaacattgacttgaaccaaacacttagaataaaccatttccacgtgtagcaggggagcattcagttgggcaggaaagtaggtaattctttgaacaacagaccatgccaatgttttacagttgccgtctattaaattttctactcataatcctattgaatactttgaacatggaggtgttgttggctgtttggtattcatatttatgatatcctattttcacctcacaataacatgctttgaaattaggttgcaattcttgcaagcatcttgctatacaatttgagtataatttctatatgttgggtgtaacaaattttatacaattaatcaaataattaccttatacgaattttaagatatattattataagagtcatcaaaattattatatactagttgaaaaagagacactttctttctttatttttattttttaaaataaacagtaaaaagaaaaaacggttgcaaaaactagtgacaataattatattttaaaggttcatgaaaaaaataaaaaaaattatatattaaagaataattcagaaatatgaaatgtatatatcaaaaggagtaattatctttaatagttatagattatcatttttgattgatttacatacagatactttactatatggttacatatattactcatacaattttctctatcatgctctattatgacataaaataatcttacctaacaacttttgatttttgggtattgttgatgcagttttcaacacggacacgaaccactcagtgattcaaacatacaatttcactacatacaaagaatgtgactatgatgatgcacaagacaaggacacaacccaatggtcagcagctgatccatccaacacccaaacacatcctgtgacagtggcagttcctttggtgaaggaagggatgacatacttcttctcaggtgattatgatggtgaccaatgcaagagtggacaacacttcaaaataaatgtgacctatggacaagggttgccaaagagtcttaaatccccagaagatgcaccatctcctgctagtcctgttgctggagatgatgaatcagcaccagacactattgttccttctaatttcagtcaccccaaagaagaaagtgatgatgacaaagctagtgatagtgacaaacagaaatctagttctatttcaatctcaatgtatgcacaacttcacattgtcttactaggaatactacttttctggttttaatgagtcgagatttgttttatattattttttaattatagatatatgctactattattttatctatttttttattgggtgtgagtgagacagtggggttttgagttgagttgtgagctaggatataccatatgttattgctgtaaactaaaataatgtaacaattaattacaatcctttattgctatatgagtttcaatttattagatcaatatatacattgcttgtccctttatctattctcgagttttcccccctcctttttctattgttgctggcaacttcgagagtggtgaagaattagtaaagacaaaatacatggtgcctgaggaaaggataaaatgagacataaggagggagttggttggaggttgtaattattgagataactaaaagtaactagaaatctgtttgataaggaagtgtttttgaaagattttttactgagtaaaactatattttcaataaagtttcaaaagctcttctaacttgtacttatataggccctaattggttatgttttgtttattagcactactaaaaaaaccactaaatcattaataatgtcggcacctacccatatcaagtatgatgccatgacatatgatactttcatgtaaattcacgtgattatattttatgtcagggtatgtgaaagcacgtgtagcggcataaacttattttttctcaactttcttgacttctctagctaatttctttaggcttgatttttttaaagattttcgagttcttaatattctaggcttctcttaactttaaaacaccattgtttaatgttttttaagtaagcttacttcacttatactacaaattttaacatttttgtattgtgttatacagtttaattagtttttatttatttattaaatttataatataaaatgcacttgcatccaaatttaggatttcattttgccattacatgttcacacagacatttcctatgtgttataattatattttactctttttgcaaacattaagtctaaagttataaacattaagatttttgtattcatttgtcgcaaacaaacatttcctataaaaatgttttgatgaattgtgaatttgtaatggaaaacagagaagcgagtagtctatatctttgggttgagagagaataatttttcaaacacatactaaatttagggctggtcataagaatcaaactatgacatatacaaatgtgtataaaaactaaaccaaatattgagatccataacaactaaaagaagaatagtctcaatgataatgaagaacaactacattgttttttactcttcacttccggtgttccccaacaacacatttttctttccactcttccctcacttgaactaccattaatacatgtatgcaatggagcttgtcagtgtctttgtcatgcccaacgacgacgcttcaatgacaatggtcgctgccgccgccaccaccacaaccaagtggttcaaaattgttgttggtacacatatgctctgtcccaccaaatttgtcccaaccgacgttatcatctttggagatgaggaggagtaacaatatcatcacacgagattcgcctcttaaatttcatatctgaatcatatctagatcatggccagtggcggagccattcccaagccagcaatggccatggcatatgctaaaattattaattcatttataattttttttattatatacagttttattgatacacttaaaaaattgataattggtatagactaaaatttaattggcatgggctaatattagttgctggctccgccactgatcatggcgaaaggaagtggaggaacgacaaagagcgtgaagggtgatgaagagtacgattcccatgcaaaatcaccaccactttatgcattcttaaacaatgaaccaccaccaagcccacttgtgtgtgtttgtgagatttgggtttcgtttgcaaaacactgcatgaatatgagccttcatttgtctcagatctgttggggttagggttaggcttgggtttgacataaaaataatctagatatggtttttgttgtttgaagaagatgcaagcatatgcaaaaaacacccttgggtgagattgggatgctacacatcttggggaatgctttgtcctctgataagattgttgagccaaggcatgcccctttgattcctggcatggaggttaaggggattgccatttgggttggggcttttggttgtaatccctttgatttttcattataaaataaagatagttgcgatttttagttgtgattagagtaattatttcaaaatttaaaacattaccaatgttgacagaacactaatgttatgaacaaaaaattgaagaaaggaccaaacaaaaatttgataatttattagggacaaaaacatttttaaacttttaaaaaatatttattttaatttttaggtatttatttcaactttttaaaataattagaagttgaaaaagaataccaaatttgactaaattcaaaagctattttaagttatttctcataaaattatttaaagaaactgaattttaaaattgtaaacaaacataaattagatattttaatctctaaaatattgttttagaccataaacactttattttttaatctctttgcatgtttagtttcttgtagatggtgagtcaagtcaaaccaagtttaactcaaaagtaggttgtttggtaattaaaataaaaatcatttcaattagggaaaattatggtggaaaaaacaagttaacactaaatttagtataaaattttaggattgaggtttgaaaaaaattggagattggagttctgattcatggtttagtgatttgtgatttttcttatcacaagttatcgatttgaattttaaattatgttttagtggattgttgattttgtgtattaaggattattgattttgcttggtgcgtcaaaaaatttattgtgtcttatcactaaaaaatgtctcaaactaacaacatttaatagtgtgattgttacattaaactagtaatctatgttacgagcccatatgtctcacataatcactattcactcaggttacacttgatgaacacaactaaaaacaatgacaaaaaatggttaagaactaagattgataaaaaaattatcttaggtactaaagttgaattacataaaaagataagaggattaagacctagaaaaattgttgagaggtaaaaaagtgaatgtcatgtgacatgacaatttatgtaattgtcaatgacattgctatatcatagctcttaccttttggaagcataaaattgaaggatttttttttttaaattagtgagtctcacaacttcattaccactttaattcaaatatttattctcaattccatttaattctactttaccaaacaaaagcttagtgtaacgccccctcaatagtcagggtcattaccaagcataaccacaatcaaccagataatcaatcagagtttaagcagtttggaagcacatatataaaagtgacatcaacaaatgtcatcatcagatacactgtacatataatatggtgaatatacatatatctctgtttagatacaaaactgtacaaataacccctcagggtataacaaaatcaaaaccaaaggctaagtacaaaacatcagagccacatgctcatatcatctagcctaaggtatgcaaacagcagctatccctgcataggcttcttgccttgggatctatctgctcctccagatgaatcacctgcaacgtaagtcccacaaacggggtgagatataaaatctcagtaaactcaggacccttgaaggtatttccttcccctggttcactgacaaccacacatatgtatatatgtgtcaacataacataatcacaacagtgaaacgttcaatcatcatcagtagtgtacctcaatacacatccatctatctagaccatagtctagtcatggcatacaatcatgcatcatatccataactatcatgcagaggctacatctatgtatataggaacatctcctggcaggatctctatgcatctatcagaggctacctccgcatatataggaacatctccatttaggaggcaacatctatatgacgggaacatctctttatagtgaggctacatctgcagatataggaacatctccaaccaggaggctacatttatatcgcaggaacatctcaccctctacaacaatacaattgcctgaggaggctacctctgtgtatatgggaacatctccatacgggaggctacgtccatatcacaggaacttccctcagcagggcttactcaactcaatcatctatcctactacaataagatactattcaagcacaacatgcatatacaggtttcacattcaaccagacatgccacaattcactcacatcatagccatgcatatcaatcccctatcacagggttcagttcacatttcaagcatagcagatcaatacatctcaatctccctttcatagggatcagaataacagtacacagcatctatatacatgtatactcaattgtcctaatcaatcaggcattcacatccaattccctttctcagggtcaaatacacatcaagtccctttctcagggatccatcatcactcaacaactcatggccatacataatacttacccatctctgggttcagatcaaatataaagcatcagctaccctttcatagggttcagacaacatctaccattcattcacagcattatacacattcctctactagcacatacacatatcataaccataatctcaatggatatatatatggtggaacgcagtagaggatacacaaacaagaaccatgagcttacctgctctagacagatttccggctctcccggcctcgtggtcaacaccaccagagctatctagctcacgtcctacacaagaaccagtacataacatatcaaatacggttctaggtcattcaaacgaaaagagaattatcatcctctctatcaacatataatgaatcactacacaagtgatttccggaccctaaacaggatccttctcagcctcaacaaggctacagagcctccacaaagactctgatcaggctaatacaaagcatgtccctactttagccttctcaaagtccaaaacctcagtatcagcagtttaagctcataaacctcatctatactctctcatgagcaactttgtcaactgatctaaggttcatactagtcatattactagccttttatctctgctcatacatactcagagccaaaatcaaacttcatcagtaatgatgattcaaggctctaactccctcagaatacctttctgagcacaaaactctacagagtctgagcctaataacggctctaacacctccaaagacacccctctatatacccccataacccacaaaatccaatacacagaaccaaccgttagagctcgagtttcttacctctgtgatgttcagaaacaccagggaatcaatttccctaaggtagctcgctcaaacagggcctcctttgcctttaaactccgagctctcaagggttctctcagagaaatcaatctcactgtttatcgactattctcacgaatcaatccgggattttctctcctctcggggctctgatcactttctcagttgggctagaggtgtttagatgaaagataaagaagatataaagctctgtaactcatcaatggcttcctctctcttctttcctcttccattttcgtcccaaatgaccttttatataggcctgcccgaagtcccgcgctgatagcgccgttcccgcgctaatcgcgccatctgctcgaaatacccacgctagtagcgccggattcacgctgatcgcgtgaattggcctcgaggattggcctgattcaagcatctcacgcgaatcgcgccactctccgcgctgaccgcgccacaggctcgaccaacccacgctgttagcgccacaaaccacgctattagcgtgaactagccgcaaggattgtccttgtttaagcatcccgcgcggttagcgtcaggccccgcgcggttagcgccacatgttcgaatcagttttctcaactctttctcaagcttttctctgaatacccttaagcatacttattatccttaatcatgagcttaatctaagcttaattacatgtttaaaatccaaggcattacacttagcatacttgttgtcaaggacaaaaaaaatgttgtccaaagaaattaaaattggtcaattttgttgtttaaggattaaaaataaaatttgaaaaaaaatagtttccaaatacatattcaaccccaaaataaaacaaaccctagagtttatagattataaatgcaaataaaggcctgctagggtgaatttatttaaacttaaaattcaactttaaaataaatactttttatataagtatttttttaataaatgaataaaatttgcttcttaaaataagaaaaaacctattttttagtataaataatttacataaatatactaaaaaataaaaatcacttattttattaaaataaatacttatttcagtaaataaattaatcatatttaaatcataagtttttttttgagagtttttattaaaaaatatagtttttttgatagagaagttctgaattgagattggcctagttggaattctcttccgaattgggcctaggggtgacttgaagaagaggtagagaagagcgactagtcctactacgaagcaagagtagaaagcagtcgtagagggcaagcagcgactctttctaattcatatttaagagcacaacaaataagagtttgagtttgttggcgaagaaaggtatcacagagaaaagaaaaatggctgaatcatcgtcgtcgtcgttggcgaagtctgacgcggaggtagaagaaatgctggatcggatgctgactcgtttggctctctgcgacgattccaagctggagccgctgctctccaagcttctccccctctgcatctcctctctctcctcgcaatccctcgccgttcgcaacaaggtcatcatctgtctcacattccatttccgaatcaaactctcaatgcgtaaattcgtcgtgttttggttatgcatatgtaattggttacattaaaattgaaaatatctctcatctgctgttgcgattgctgtgtgaatcgatagaaactatcgctgtttagtgagagtaattttgctttggcatggtaagatttgttgcgcttgtaagaataataacgaagagtttgcgtgcatgtactctttgatgcaaatttgtcatcaaactgtgcgagtgcggaaattcgttgtgttttgatgcaaacattatcggctagatgaaataactcctctctgctgttgtggttgcttaataaaccgatagaaattattgctgtttagtgtttactgagtaactttggtttggcatagtaagattgtgttacacttgagtttgcgtacatgtacaactgttttgcacggtctatttcatcctctttgatgtgattttgtgaagcgattaggtgactttttcatgattgttgacttgtgtttctgacaggtgctcgagattttgagtcacgtgaacaagagagtgaagctccagcctcaaattggtctacctttgtctgacttgtggaaattgtattcggaatctgctgctgtccctatcataaggaatttctgcattgtgtatatagagatggcttttcagcgtgttaatgcaaaggtctcttctcgttctttatatcttagtgctgtttgttattattattttgtggctttaaagtcaattttgatgctgataattcttttttcagcagttgtttaaattttcaaaagtaaattatgttttgttgtcggataaatagataaattgattggtttgggactctttgaagaattttgttttctgctattgaatgcttattgtggagactatctgacgcaccatgcattttgaataggaaaaggaagatctggctcctgatctcttggtgaacatctcaaaacttccacttcagcaccaggaaattatccttagaatcgttgttaaggtatcaacatccactatttaactttgaccaaatcttccattgtcacggttataacttaaaagtacagtcgtagaagacttttcattgatcattttcatggtacacagtttttgagttggtaatattaattgttcagtgcattgagaccctttttctccttattctatccaagtaaggcttcagttttggagaaatttctttcaagggaattgggaaggatataaaaaggaaaaattagagggaagttctaagtttttttgcttgggaattgacataaaaggatttttttgatgggaagaagggtctactaccaacactaagagaacttggatttcttgaatccatgggcttctgtccagcatccttttttaaaaggaaatttcttggtctattttcattgtgtatatcttagttgttcttttgttcttcctttcactatcctattgaatagcaaagatcaccctcagttataaatcttcaggatatgactacttatggatttctgcttccttctaggtaattggtgaatgccactctggtcaaattggtgatgaagttgctgcaaagtataaaaaagtgaacaattctcaagatagggagctgtttattgagttttgtcttcatacaatattgtaccagcgggtctctcaaaagtatggaactggatttatgctaaacggagcttatgatatttgaatttgttctaacactagttagtcttttaaattcctatttcaatcaaatggaagtttgatagagtatatagtatgtgcctttgtttatgcgcatgttcctgttactagttgctcttcattgtaaatggcaatctagaatgttcataagttaatctgttcgtgttctggtggaatgttggtagttgctgtaacagtcagtgagtaagaagtttgttgaacaaagttaaatattgtacacataagaatcagaatactctgaatccatatctaagataagaatagaaagtgaaaactcagttttattttcacaaagattttgtctcagattctctctctctctttagaactctattatagattttgttctgttgcagtggtggattccctcctgggctttcagtagctcaagtcaatcgtgttacggggaaacaacaattgcaaagtaatgaaattttactaagaaaggtaagttaatcatgtaatggttttaatattatcttgccatgtgaaggtcgaataatatatgttgttgatgttgtttctttacttctaaaaactgataactccctctactactgctatgtatcttccatttcttctcttgtcagaagaagcactgtctaattcaagaatccctcatctcaatatgatatgctgtttacttttttcccgtagaatttgaagattgttagaaaatgcaggaagagaaataaaatattcagagagagttagagagaatcagaacctgatattattgtgttgttctgaatatactgattatatgatatttatatacaagtcataatactagatggttgtaatacaaataaatgacagctggagctcactttcataacggacatgctaagctagtatagttgttttgataaccaaccaggcaactgttaactactgcaaccgacagagactagagatcaactattttactctgacccataactgactgagactaaagattaactattctactctgacccatatgacctttccaaattttcatttgaatacactagttaacatgtcagtatttccatgtttgaacgcatacaatcatgtcctatttccatgtttgaacgcatacaatcatgtccaatcttgcatttactcagaaagctacttaatctgtcttattttgttctttgttggtgcagttgggtattttgaatgtcattcaagctatggagcttgcctctgagctcgtttatcctttatatattgctgcctctgtagattggtatgttgtagttcccgtgttgctcaaatcatttttaacactttcttattaacttactgattttatatccttttggtgtttcatttgtggatgatcacatgtgttgcttgatcaattaactcaagtgaagagcctgttattaagagaggcgaggagcttctaaagaagaaggccaatggtgctaatttagatgatttaaatctgatcaacagattatttttgctatttaatggtatgttattaatgattgtgttaacatatacagaaatatgtttttgcaaattgattttttcttaattttgttcacgatcatatgcaaataggtgaaagtttctcctgaatcttagatttgagcctgcatgattcttacataaattagcttttaatatttgtctgctcaagagtataattgattcaaatgaggttgttcctaacttcctattatttttcacatttcaattaattaatgtcatgtgtcttctgggcaactttttgtgctcatccttcatgtttgaagtttgaactgtgccctctcggtgatcttcaatgctctattacttgctgctcccatttttcataattaaggctatttcaacacaaaggctaaagggcctatgcattgtttatgctcttgcgtgaagatgtgaaaaatataagaccattctaattcttagttgtccacctaacaacttaagctattaggagagttggtctttaacatacactatatgaggagtcacatcactttcagtcctctttttgtgtgctaacaagtctttctgaaaatgtggagagataaaatgggacaaaaggtaactgcttttgttcatggttatgattttttaaaattatctagagattgtacttcactacatttgtttcctatttttttaatctactatgaaaataataattatagaggatgacatcattgtaatttttgatggtattagtggtttttttctcccaggtcatagcctattgtggtgtgtttatgtttttgatagcaatactagacatttattgtgttatttttatgtccattttgcgtgactttcattttctattttcatagaactcttactatatcttgaaagtgtattcatttttctgccctatnnnnnnnnnnnnnnnnnnnnnnnnnnnnnnnnnnnnnnnnnnnnnnnnnnnnnnnnnnnnnnnnnnnnnnnnnnnnnnnnnnnnnnnnnnnnnnnnnnnnnnnnnnnnnnnnnnnnnnnnnnnnnnnnnnnnnnnnnnnnnnnnnnnnnnnnnnnnnnnnnnnnnnnnnnnnnnnnnnnnnnnnnnnnnnnnnnnnnnnnnnnnnnnnnnnnnnnnnnnnnnnnnnnnnnnnnnnnnnnnnnnnnnnnnnnnnnnnnnnnnnnnnnnnnnnnnnnnnnnnnnnnngtctaaaacccaatttggcttttatatatttctctgttttctcttcaatatttatacattattgacgttgaatgtaggtactgttggagttgaacatattgattcagaatcaagagtgagtcccgggagtcctgctttaaaggcaaaattaatgtctatattctgcagatctattgcagcagcaaacaatttcccatccaccttgcagtgcatttttggttgcatttatggtagtttaatattcttttatttaatgattttcagcatatattttctaatattttttcaccctcttcaaaacttgtaggccattttgttgcttaagaattggccaatgtagttaagattttatattcatccatgacacatgcactatagttatgagacttgtccatttgtattaacaatttcatggcttggcctactgtgtctatgatttttgtatatatgatatataatcttacaacttgtattacttttatagttttatttgaggttgtttgattttttttttttttnnnnnnnnnnnnnnnnnnnnnnnnnnnnnnnnnnnnnnnnnnnnnnnnnnnnnnnnnnnnnnnnnnnnnnnnnnnnnnnnnnnnnnnnnnnnnnnnnnnnnnnnnnnnnnnnnnnnnnnnctctttttgttagtttgtggaaatagattctattatgagaaaggagaagataatcaagatatagaaaatgagaatgtgcaaacccttaaagatggaaataaaaaaagtgatgagataatatttcttttgtgataatattgtttctttgatttaaacaatctattcaatgatctcgtgcaaacataaatcatgctaatgaagcccccaatttctctaatcttcaacaatggtatacccttaactaaatcatggaatgaacactgaaggtggaaaatggattataagttataactttgtaccaattatagactatgcaatcttcctttgtaaattttaataacaaataggaattttatatttttattttattgcttataatgcttctttcatattaacaaagtttcttccctttcatataggtttagaaattgcaattttcctttgttgttctaaacaaagttcttatttcattatcaaaatatcaaaatatgagacacacgaaagtgtggatcgataattgggttgtctgtgcagattttattttgctctgtcttttttctactgttctattttgtttttcagtttttatctttgatttgtcatattcttgaatttaatagggaacggtaccacatcaaggttgaagcaattaggaatggaattcactgtttgggtatttaagcatgtaagtgcaatatttcttggcgtttgttttttgtcataaattttacccatagaataaaagtctcttggcctagtaattgtttggaaactagaaactatggttacaacataggacatggatatatcacactggcatagggatataacattttaaaatcatagaacatgctacggttatcataatgcaaagtataaaatttatgtaaaattaacataaaatgacccaaatcttaaatcaaaaaagagaattgatgttttaaaaataagcatgcataattgtagaagtcattgtagatataataaaatgctacaatttatctaataactacggtgttttcatctttattggtgtgaaagtttaaaaataaaagaaaaagttgtacaaatatgtgtctgacacaacacacgaacattaatatcgtgctgaagtgtttatccttccttctttaaaaatgattcaatttaaatgaaaataaagtctactaaaagataatttttttaaaagtggttcagttgaaaatgctgcttgaaatttgcaatgaattgccggtttgaaatgaattttactttggtgaattctatttctatatttagattagcttttttgtatgtggttttacttcactattggctgatgtggcagaaatgtaaaaataaactattggctcaattatgtatgtagttatatattcacattgtgggttaaatttttatggtttcataccagaggtagaatggataatgttgctagacataaaaaccatttatatgctttcgcccaacagtttaagctttttgggattgttgattcgtgcgttggtattggagctcctatgaccttgtggtctagagttcaagccttgttgtccctgttcttctaaattaaagttaaattttagcatagggtagagcaggtgcattgttcatgtttaagcccaataggctcttgcattaggtgggatttgagattgttggttcatgacctatatattcttgttaaaatattgtaaatgaaccttttttttttaaaggcatatttgtacatgaatgttaacttcaccaagatataaaaggtcttatcctggctttaaatctttgtttttcttttgattgaattattttgcttaagaatgccacctctatatgatgaatcgacttaaagatcaactaccacatatacctagtaagaatttaagatgcattgcaaatgatgtcatgtcctcctttgtcccatatatatgtatactttggcagttgcatgttttaccatgattttttgttttttactgaagtagtataacttattgtttccttagcatctttaatatctgtaactggaaatgcaggcaaaaattgatcagcttaagttaatgggtcctgttattttgagtggaattatgaaatccctcgacaactatccaagttcagaagcaggtttgctaaagacttgaaagttctttttaatgttatttgaataaaattagtttattttacatttaattttaagtattgactcagatgccagtgctcgggaggtcaaaacttatgcatttcaggcaattggattaattgcacagcgcctgcctcacctcttcaggttccaatctctttatttctcatggtcataattttagccatttttgcatatttcccccccttttaattggtacttatttgtgcggatgggaccaaaaatatgtttgaaagtgctgaatggtgcagaacatttgaaataaagtaatgaacaatttataatatatttttaggaaggttaaaaatgaggctgatagcccttgtgccttcaaaggagattgacaattgtgccatttaatgtactaaaataaaacatgaaaacaagtttagcaaaaaaaaaaaaaaaaaactatttacttgttttctttgtcaaacttacctttaacagtgttctatggatcgacataccaagcctacactgctctgagaactgaagaaaatatacatattactttacaacagaagaggcaagcatgtaaaattgaaagaatgattcaaactaaactgtgaaccccattttgtgggaaagtagaataatgggtattaggaagaaatgaaagcaatgaatttcaatagagaaaatacaaagagtgaaagaggagtttgggtgatgtattgtaggggaagcttttctcagatggaacaaagagaagaaagaggaagctttctagagaaagtgagttggaatttgatggagtgtaaaaatgtgtgggatatgaaagcaacttctccctgttagctcattggatttttaaataaaagcattgagtaaatgcttaaagttataggaaaaataataatggttgagggctgtagttatccatccagtttggtaacttagttcctccatagcttgttatttcattctttcaatatatgtttcaaaatctaactattcataagttatcattagatctttctgcaatgcgattgtgaactctcttgtttggacagtgatacactatagaattaataattctcactgttgtagacttgtaggcatcacaaggctctttctcctgatctgtgtattacattatgagatagagttgtcttctttgtttccttgagactgtctgtaaatgttttctttagagatgtttcttctatggtttcaaaaagggattggatagctctctatttaattatttcttttttatcccttttaaatttgcattgttttaggatggtttgctattgattttttattttattttattttatgtatttcccttttttcaggtaacaaataattctctttaataaaagaaaatttcttttcatgagttaggtcctttctgagttctattaagtagttactaatttagctgctccctgttcttccagggaaaagattgacattgctgctcgtctttttcatgccttgaaagatgaatcccagtctcttcgatttgttgttcaagaggcaactatatctcttgcttcagcatacaaagtatgtacctctttctgccacttgtgtaaatctatttttcattaatattctcagtcatggaaaacgtattgagtatatgactatctgatgtgaaagtgaaactagtttgtcaagtttagtcacacagttatgtttacctcacttgcatatccaagatacatcatatcatgacatatagatattttgacaaataaaaagtatacaattgcttcccctattttcaatgcctcaaaattataccctccattttcatgaaattcaaagatgtaaggaaagtaaattgagatgcattgctcattgtactgtaaaattgcttgttgcaccttcacaagtgtatgctataagaaattataagtcattggacacccaaagttgagcccaagattagctgccatgatattcaacataatccatctctttcggaggaaaatgttccatgatttaaccccccttttgatcatcacatgttaattaaaattaatacattatagattggagaactacgatgaaccaatgaacttatgttttaggtaggggtaaacatgggtttgaacaacctgattaacccgacttgattcgaacctaaacaacttggtttgaccaaactcttggttcaattcggatttcaaaagaagcaacttgaacaagtcaagtcaggcaacatgtttatgtttgcaaatccgagaccggacccgacccaagttatgtgtacatgtttattttatttagtatgagacagtgagtcagtgaatgagtgttttcgtattttgtttcacttcgttgcgtgccctaacagcagaagcaaacctgggcgtttccttcttcggcgataaacagcccacgacggttaccaaaccttgcttcgattcctcaattccaagctagggacaatgtcatcagactcaaacatggtcgatcccacacgctccgcccctaattttccctaccaatccgctacgctaccaccattgtccattgacgacaagaatcagaaggtcggcgagtttgaaggctacttagttcaaagacttgcagacggttccatctccagatatcccaacatgctgctgtttgtttcttttctttctttgtttctttcaataccagttctcagttgactccatccgtggaaattccttacgctgatggaatacaatgcagtcgatgcaaattctgtttatttattttccgatttgtgactgttctgtgaatctgtgaccgtctctttcatttccccaatattccaatttaatgttttctgatgggtaacctgagaactgatttggtttgtgacccgaagttagccaagtcggatcaattcaggttgggaccggaaaatggtaacaacctgaaccgacttgacctgaaatccttgaagcaattcagttttagttcgagaagacgaaacccaaaccaaattgacccatgttcaccgctagttttaggtattgttttgacttttagttttgatctgaatgaattccttgtccttataattattttctttccttctaacagagtcttatttagccaaatataattaaataatactaacaataatcatttcaacgtattgatatttccctattgtctcttgcactaattcaaggaggtatgaaacatattacttggaaaaattacgtcatttattcaaattaggaaagctatatagtaaatttatggttgcattggtgttatgttggttgagttgaattcttttatttcataaaattagagggtagaaacacaattttcttgagactccttttattttaagggctatattttttaactctttcaccaacttaatgtcataactttgaaattctctcaaactttaggactttaggtgttgggctaaacataatattgtgactctgtttacaaacttcagatcatgatctattttggacttttggttgatttaggatttgaccctcttttctattgcacattttttattgactgaagtacttaactgtcttgtgtatcagggagccccattagccgtgttacaagatttggagatgcttctgctaaaaaattctcaagtggtatgacaaaacatgctgactttccccttgtatctaggagactgtatgcagatatattaccttgctgagcaagttcatggcacagttgtattcgtatttgttccagttgtgttgaaagttacataaataacaaacctactccactttcttagttgcctagatttattgtaacttagggaacaaagttagaattattcgcctaattattctttgttgtaaattgctgcttctatttatttttcctatgtattattctgtatctgtatatatatccctaggatgagtgtgtatgtcaatcaagcaattttactcagattttcttatagagaagctaatatgagacaacttctacaaattgacttgtgcataaactaattttagcttatgaagaaactcatttcatttttcttcttttaaaagtgcttctggagaagtttatctaaacatgccctttaagaagctagaaaaactacaggatgccaaatgaactcaatagaagattcttgcatttctctccaaccaaatacaccgaagaactgcagcctgagaacaccacatagctttttggcatctttgctataaccaaatcctctgaaattgttactattataattattttattgcaatttttagctttattttgttatttttccccctccaaacaattgattttccttttatttcttatttccatgtagtaatatccttttttatctaattaaaatttaaaggacatatggtttgaacagtaacatgctgcatggtgatgacaggaggaaagtgaagtacgattttgtgctgtaagatgggcaacatctttgtttgatcttcaacattgtccaagtcgttttatttgtatgcttggagcatcagatgctaaattagatatcaggtattttacaaattcctttagcaatgaactgacatgctatgatgagttaaagcatgtagtcttcttaaagggatttctcttacagatattttgagcaaatgtttagctttgcttggtgtttttctttgttttttgtgtttttccttttactttatcttcccaactgattttcttattttatcaacaaaagaggaaaaaaaaagaagctctccaggtcaatttattaagcatgcccttcattaaaagcttttggataattttccaaaattgttttccaaaggaggtgcaattagataatgaaccctttattacatatgtctttcaatattgcatcaaataactgtttgagcctcttggcaaatcaaatgtcataatttctataaagcatgtacagaacatcataatatgcaaattaaaatgtatgtggcatgcatagttgtagtttttaaagaatattttgtcttgtaaatgtgttaaattttaataaccatctttcttgaatttgtcatgtcctcagattgtatggcttttttaataatcagagactctgattcctgtaatgtgttttttgttgctataaatagttacttttgttccatgttgatgatttttgaacttttttttttctgagttataacacaaaaactttgagttgtaactttagctttataattatttaggtttcttttgtaattaagtgatgatgttttttataacttgaagtcttataaatcatattaggttttgttttctggtttgaaacagagaaatggcacttgaaggtctttgtcttcttaaaagtggaagtgaaattgttggtcttaagtatcccaaactgggtatgatgctggatcacattcttcaacaacagccaaagttgttggagtccagtgaaactagagaacagaaccttctttttccttcaaatacatatgtggccatgattaaatttttattgaagtgctttgagtcagagttggagcagaacaaatccttagaaggatcatctgaatttatttcatcagtgaaggcattctgtttggttctcgagcattctatgtcatttgaaggctctgttgagttgcatgtcaatgcttccaaggcattgcttataattggatcacatatgccagaggtcagttgtaagagctctttgattactttcttgattgtgttccttctgacacatattgttataggtggtagcatcacattttgccctaaaagtttcatggcttaagcaactactaagtcatgtggattgggacactcgtgaatccattgcacgcatacttggtattgtgtcttctgctcttcccatccctgatgttatgtctgaattgacttccttattcagccaaacacacaaatcaaggtttgtatactggtggaactgtaattttttaggtcagtttatgagaattgctgctttttacctgttttatatatgctcatgttgaattaatttattgataggtttgagactcagcatggagctctttgtgcaataggatatctaactgcaaattatttgtctataacacctgtaagtataattttactgctttttttttaattagtaaacggattagaacactataaacaagctttagctgggatcaataggctttaggattttatacttttatggtttaacacaacttttgcataaaatgctagttttatcagtatgatatttgagtcatgtgtaattgtgacttgtgattttgatcttgatcaacatgctgccctttgagctaatgccttttctgaaatatactttgatcagatgaaactgaaatcttaattgttgggtataatcatgtcattgctttcactataaatatatttgaattttgtgtatataaaatgatcttcgcagatgccagaaatacttctccagaatacacttagatgcctggttgatgtagttaattctgaaacttctgcactggctgctgctgcaatgcaagcactaggtcatattggactacgtatttcattacctccacttgatgattctaattcaggtaaactcaagtctaataagctgatgtacttgtttggatttggacctagagttgagctatttgttgatctattataaaggtgtctgattaattctgcagatggaattctgataatgttatctgataaattgagcaagcttctctcgggtgatgacattaaagcaatacagaagattgttatatctattggacatatatgtgtaaaagaaacatcatctactcagctagatatggccctaaatttgattttcagtctctgtcgatctaaggtaattcagcttctccctcctcttttatatcatttgcttattgtcagtgtgattcatgttggattgatgtttactttgatgtttctttgttttttgtctcctgtttcaatttattgctccatctttttttttttccttctttcctttttatgttgtggaaaaactagattttggtttttgggatgccttgatcttgattaaaaacaatttgaagtttttttttttcattttcttttgagctaaaatgtccattaatgttaatctttttccattataagttgcagcgactaaaaattgtcacatttatgtaactgaaatttcaggttgaggatattctcttcgctgctggggaggccctttcttttttgtggggtggtgttcctttcaatgctgacataattctgaaaactaactatacttcactgtcaatggcttcaaattttttgatgggagatttgacctcttctgtatctaagcagagtactaatgaacaaagtgaatatagtggagattatcacgcttctgtgacagatgcaattaccaaaaagctctttgatgttcttttgtatagtagcaggaaagaagagagatgtgctggaactgtttggctagtatcacttataaagtactgcggcaatcatcctactattcagcgaatgcttccagaaattcaggtttgcattaagaaaacaattttggctttgtttaaacttgctgaatttgttaaaggtgctcatatgagtcctttctgaattttattatgatggtgggagtgtgtgtttatctggattccagtttataacctttggtgcccaagcaggagtgcttggtcaaggttgtttgctgggctgaggttcttccatgttaatattctaaattgttgttgtaattgatatggtggagcttttcttgttgtgaaaccacaaaatgtttcctaaacctggttacctgggtattcttataatttattttgggctaattgtgtttttagtctccgaaaaatggtcacctttggtttaattcccaacttttaaaaccataatttttgtctatatttttttaaatacccactaagttagtccctaaagctaacactttagggaatgaaaacttatggttttaaaagttggggactaaaaccaaagatgtccatttttcagggaacagaaacaccattgacccatttgttttatatgatgttcttgacactgtatctattttgtagcagaatcctgtaacttgtaatatttgatttacaattatcatgtaaatgcaggaagctttttctcaccttcttgctgaacaaaatgaactcacgcaagagttggcttctcagggtatgagtattgtgtatgacattggtgatgaatctatgaaaaagaatttggtgaatgcactggtaaataccttgactgggtcagggaaacggaaaagagtcatcaaagtaagttgttagtctagtcatattttataaaaaaaaattgtttttggtgggataaggattgatggtttattattttttgctctcttccgttaattttgttgtttaaaattacattcctgaagttttgttgtgcagcttgttgaagacactgaagtatttacggatggagctcttggggaaagtgctagtggagggaaactgaacacttacaaggagttgtgtagcttggcaaatgagatgggacaaccggacttaatttataagttcatggatttagcaaactatcaagcttctctgaattcaaagaggggtgctgcttttggcttctctaaaatagcaaaacaagcaggggttgttcttaagccatttttacgttctttaattccaaggcttgtacgctaccagtatgatcctgacaaaaatgtgcaggtaagtgccatcactgccagaaaatcatagtggtagagaataacagctgcccccaaccccaagtttctataacggtttaacgctttgttccaataaaaaacagaaaaggaatggatgcacacaagtacaatagcatttgcattgcttctccagttctttatgggttcagttgaaagtcaaaacattaaaaaatgaaacttactttattatcttttgcttcccatttttatttatattctggtaagcctggtgttgaatctaattcttaccaatagcatctccagtttaacccagaaaaactctctacccagttttgatctatgatagaacataatagtactatataattcatgccgttgttttcgaacatcaaaatgtagttttgccgcataaaattgtggtttggttctctattgtgttccatgtaagatttttctttttaaactttcaaaaaaataatgtgcagtttgtatttttttttttttnnnnnnnnnnnnnnnnnnnnnnnnnnnnnnnnnnnnnnnnnnnnnnnnnnnnnnnnnnnnnnnnnnnnnnnnnnnnnnnnnnnnnnnnnnnnnnnnnnnnnnnnnnnnnnnnnnnnnnnnnnnnnnnnnnnnnnnnnnnnnnnnnnnnnnnnnnnnnnnnnnnnnnnnnnnnnnnnnnnnnnnnnnnnnnnnnnnnnnnnnnnnnnnnnnnnnnnnnnnnnnnnnnnnnnnnnnnnnnnnnnnnnnnnnnnnnnnnnnnnnnnnnnnnnnnnnnnnnnnnnnnnnnnnnnnnnnnnnnnnnnnnnnnnnnnnnnnnnnnnnnnnnnnnnnnnnnnnnnnnnnnnnnnnnnnnnnnnnnnnnnnnnnnnnnnnnnnnnnnnnnnnnnnnnnnnnnnnnnnnnnnnnnnnnnnnnnnnnnnnnnnnnnnnnnnnnnnnnnnnnnnnnnnnnnnnnnnnnnnnnnnnnnnnnnnnnnnnnnnnnnnnnnnnnnnnnnnnnnnnnnnnnntttttgcctttttcaataaacaattcctcttttattaaaaagcaatgttatgcatgatatccaatgagtatatgaattcttattttcagacacttatttcacttgattattgcatttttttctgtttaggatgcaatggtacatatatggaagtcacttgtggatgattcaaagaaaaccatcgatgaaaatttagatctcatcattgatgatttgctagtacaatgtggatccaggctttggcggtcacgtgaggcatcatgtcttgcccttacagacattattcaaggacgaaagtttcatgaggtcattaacatttcttttgtttttcttgagtataaacaagcatacttagttgtcaatgatcaattctattatagaaaagaaatcctcaaaattattgtaatcaactaattacatgtagcaacaaaaaccctagtcactgttatggtgaggcactatctgtaaaaatctgagcaaaattttagctttgttattgttgtgggtttgtgatgtttgtcaaaggagaagaatggtgccagttctggccttctgttttttccttcccatttttgtcgagttgtttaaagctttatgtcggtataaaatatggtttataagtttatttagggggctttcaagtgttgatttgaagagggattagagagctatttatatatgatgaacaattctgtttggtatgttttgtttgatctaggaggatttttgttctcgttgtattccttttctatgaaatttcctttaaagaaaccagttagtcaatattcctctttttagctgtaatctaattgttgcttatgcttgaaaaattaagcagagccagttatgtatcttatgtgtgctaataaagtctgatttgcataaaatgtatttacgagagaaagaccatattatgctgaaaggagagttaaaaagtgaaaaagaactggcaatgttaatgatatactagaacctgagcactggttgattttgatatatctgaagctgtggagcatatcagcatgtctttattcttgtttgtgtgtttttatttcatcttgcaccacccacaggttgggaagcatttaaagagattatggtctggaacattttgtgtaatggatgacataaaggaaactgttagaatttctggtgaaaaattatgccgtgctgtaacttccttgacaacaaggctctgtgatgtctctctaactgatatgtcagatgcgcacaaagcaatggatattgttttgccttttttgcttgcagaaggtatactaagtaaagttgatagtgttcgcaaggcatcaattgcagttgttatgaagcttacaaaggttaggaatgtcttgctatgcggtagcttttcaacttgtgtcatacactcactttccttttgtttctctcttatctttctgcctccggattgtaaatatttgtgtattcacatctcaagagttgtttgtagttcaaatcttattgaactttgtagggatgtatatgttttcttggctctagtgttttattatctttccttttgttttttgttttttattatcatgggatgtatatgttttctttgtgcattattccaatgatttttcaggtgttatttttttggacacttagatgggaggtccatcacttactgatgttttgttttttggtactatgttctttgtttaatcgtttaaggagtacagcttatcctattctcttgtacttatatttttcaaacttctttcccaaaaataaaaaaactaattagaataccaaatgtttgtagaatgtatttcctggtaagcatgattagtgctaacctgcacatataatacattacaaagtttaaatagcattcacagttttggatgtgtttgttgtctctttttgttttagttatttagtttatacgtcatgaaatttgtggtttgtctttgactttgtttatctgattgtgattgtgtaagattaatgattgattattatggaagtaaactataacagtgctgttattctgctgttaaatctgagtgtgtctccttttagcatgctggaactgcaattcgaccacatatgtctgatttagtgtgctgcatgcttgaaagtttatcaagcctagaagatcaatcactcaattatgtcgaggtttggttgaatgatatattcaattcttgcacaaattcaccattaattcttgtttattcatatgttaactttttatgtttttctttttatcagcttcatgcagcaaatgttggaatacagtcagaaaagcttgaaagtttgagaatctccatagccaaaggctctcctatgtgggagactctggattcatgcataaaagttgttgatgcagaatcattgaacacattgatcccacggcttgctcatttagtgcgatctggagtgggccttaacactaggtctgttattaacttattatcacatttcatgcattttcttttgcattgtcttcctgcttgaactgtcttgagtcattttgttattgaattttcccttgaaaatttaaggagcttatgttggttcaaatagggcgagtttagtagaaaaagcatgtaggattagtgacgataaatagatggttgatatttgcagtgttttctgtattaatatattgtcatccttatcacgctgatgctccagctttcttgttttaataaaaaaaattacattcctttgcttttcctcttccttctttttgggaatattcttccctataattagttattctttctgtgcttgtgcagggttggtgttgctaatttcattaccttgttgcttgaaagtgttggtgttgacatcaagccatacgcaaatatgttggtgagattgttgtttccagttgttaaggaggaaaaaagtactgctgcgaaacgtgcctttgcaagtgcctgtgctaaagtcttaaagtatataccagcctctcaagcacaaaaacttattgaagatactacagctttgcatgctggtgacaagaattctcaaattgcatgtgcatttctcttgaagagctattcatctatggcagcagatgttgttggtggatatcacgccgttatcattccagttgttttcctttcaaggtcatgaacattcttattttttctgatgtgatttattatgtggatattttataaaaatccgatatttcgatattatatcaagccaaaatcataaatttaagcagaagcttttgccattggctgccagtcactatcatttagaatgatttgtttgttgtttattattgtacagagtgttgcagtattcaactgcactctcagttaaatcagttagttaggaattagttaggagttagttttatgttgagttagttagtcataattatctaagcctataaatactgtttgtaactcaaagttcagtggccaataatcattttcacttctttctaaaatttctctctctcaaaatatcttctactatgatctgttagaactcttttattgttcttggagaacattgggtgattcctttacatttaagtagatgtggtcttggagttcattatgatgcttatgtaacaactttatttgtctgttaattttgtggaatatgcaggatttgtttcgttcttttgtttttcctataatttctcttgtaacaattcaaaggatgtactaatctctttactgttgcattctcatcagtttcagaaattatttcatgctccattaaaatttaaaaagaagaatcttaagaatgtattttgcaaatatccaagtctaggtcactttagaggttctgagtaccattaccatgtttagtaatcacattttgctgaaataacatctaatcttggtaatggtggctactgagaaatttatgtaatcacattttgctatttcggtacttctggtgcctttcattagtatatataattttttgctgacaaaaaaaaaaaccatgtttttgtcccatttagtctggttatagtatcctttgttttagtaaattattagtatggagaacaccaagttctttcagtttcattgaccaactctcttaaaagtttgaagttaggtggagggctgggaatagttttatatttctcacacatccccctcttgtgaaagatctttggcttagttcatggaaaaagcacaggccaaagacatcttgtctctaattataatttaattcgaagaatgttcacatcagcctcaaggacccacacttgctaaaagcttaagctcttaggtggggccaataatggattttatatttaatgttggaaaattatgtatattgtttttagacatttgattctgaattttaaaggtactcaaggtaaactgtgtttattgaatgatgttcatataacaaactaaacttcatattgaataatgaaagtatttcttattttacatgaactaaaaaatgtcatgcagatttgaagatgataaaaatgtctccagcctatttgaggaactatgggaagaatacacaagtggggagcgaatcactctccacttgtacttaggagaaattgtttttcttatatgtgagggcatgtcatcatcatcatgggcaagtaaaagaaaagttagtcttgccttcttttctgcattttatattattttgatatagcctcatagaagctcggtgatttcatgattcgtgtataaatgtttgcttattttctgctgttttgcgtgcagtctgcagaggctatatgcaggcttagtgaagttttgggtgaatctctttcttctcaccatgaggttttgcttcagtctctcatgaaggaaattcctggtcggctatgggaggtaaagtaatgaattttgctttggttgagaatagtgccacttaaagtttttacatgtggcaggaaaaattattacaaaaaatcaatcaaagacaaattgctcaagtttcatgtgcttgttttgtcttattacatatggcagggtaaagacatgctattgctagcagtaggtgctctatgtacatcctgccataaagcaattttggctcaaggttcctcatcttccattgccattctgaatttggtatcatctgcatgcaccagaaaggggaaaaagtatcgtgaagcagcactttcctctcttgaacaggttagtaatttatagtgggtgctggttagtaattttgggaaagttttctcccttagggtaagtattcaattgaaaagcaactagcattcttgctttttgaaaaccaactccatctccattgagacaagtgaagatatgtacattattgtatgttgtgtataactaacatgataattcattgttaatgttaatcagttatgaaatgaattgataatggcctattttttgtagaactgtctagagaaaagaatgagtaaatgtacgaaagaaatttgcctgtactagaaattggcaaaagttatttagaattgagatataagaccccttcaggtttactttaccccttgtataagtagcttcgcaaggttgtgcctgcttgtactggttgttgagaacgtcatcaaatattcaagcaaaagataaattataataaaaaagggagaaaagtggcaacttaatctataacaagttatggaccaaaagtattagaaactatctaattctataagagtacagaacagtgacgtcccaaataagtattggactctataatgagtttattttttgtatgtttccaggttataaaagccttggggaatccagagttctttaatatggtttttcccttgttgtttgatctatgcaattcagagcccctaaagtccgggcaagcacctttggccagtgatgctgctggatcaggttatgacaaattctggatcttcatttatatcttgcaacagtttttgttccgcaaatgagactgtatggtcaccaatgaaacatttaatgcagtttttgaggtgaagtttctcatgctaagggcccgtttggggtggttttttttggtttttggttttcaaatgcaatttccaaaacaaaacacgtttgacaaaaatggaactgagatgatttttaactcaatttcaaactttctcattcattttcaaaaccaagaaaaacggatttatgaatttggtctttagttttaaatatgtacattctccttacattttacaatgtgacccttcccataccaccacccccaccatagccgccatcactactggcactggcactgccaccacaacaacctccatgaccacgggcaccaccatcgccaaccatgactaccgacattgccaccgccgttgttgtcaatgtcgtagtcaccgtcgccaccacacaaatacacccttaaactaattttaataggatcggaaactttcaaaatgagtttattttgaaactaaaaattagaataaaaaaactaaaactgaaaactgatttttttttttttaattttgaaacttacaactaaaaatcaccccaaaacggagcctaagtttgtttagtttggtgctgattaaacaaatagttaaaagagaattgtttcttgtatgatattgttaaaatgtcccacattggttaggaatatggctagaagccggaattgagcaatcctctccccttaagctaactttttgggattgaattaaacctattccatttctaatatattctgtatgtagtagtgttggagaataagttccatcattgaaaataggacacaaagtgaagcattttttattgttttttattttcattttttgctttcactttttcctatacaaatttttgaaaatagaaaacgttttctcaaaccaaacatgaccttagtatctagggacttgatgaaatggatgattctccttgtttgtgttactgttcaatacttcaatggctatttcaaatggccagccacttgactaatttgttctttccttgttacattgattcctgtcggagctgctcagtgctactgactacaagcattttcaatggctatttcaaatggccagccacttgaataatttgttctttccttgttacatcgattcctgttggagctgctcagtgctactgattacaagcattttgacatacacttttttttttttttttttttgcagagttgaacagtgttgatgagatttctgttccacataacaaaatagttgactgtttaacctcttgtatccatgtggcacatataaatgatattcttgaaaagcaaaagggcttagcgcacatgtatacagcattcttgttacctgaacataaatggactggtattctttatggctcatttttcatttttcgaagtcccttccatttttttctattaatcttaattaagaaagctttctttgtgcagtcaaaactgcagcttttgtatccatcagagaactttgctcaaggcttcacaatgttgtgaaggactcccagggaagtaacgaacttgctggagcaacttcctttgttcaggaggtaatggaggcttactttcagttggacttctaataacttcaattcttgaatgatctaaaatcaactttatttttcttcagatatttcattctctggcaccaaaaatactacattgcataagcacaataaaaattgcccaggtacgtcactgtcttgttttttttttttttttttttattaacaaatgttagttgttagtttttgttacaatgttagtggaagggattcgaatccacaatctcttctttttcccttttcctttcaaccaccaaaccaaccctataactccacgtcactgtcttgtttggttgaacattattcatcagttagattcccctgccttatagaagtcaaaaaccctgaaaaggtaatcagcatttgtttggtattaatttttaagtttgtaaaatcttatatctgaacgctaggcacattagttgacttcaatagacaacacaactgattataatgccatgagtcagaagtgcaatttaaactgggaatcatgcatattttcattgcattcctttaaatatttgttaaacgttatttatgaaatgtttactgaaacatgttccaaaaatttgatctgtgtttgtatatgtactaatatatttgccatcagtttgtatgcaaacgagtgtctttctttttctcatgtagaacttataaggttggagtggtccagacaggtgaataaaagcccagcaatctattttagtttcacccaatctttaatactaaatgcaacaaatactaagtgttaaaaaattactacacacattacatttggttgccatatctagcaaaagtggacttgggaataaaactgaagtaaaataatatttttgggaatactttaaaattcaaaatataacgaacaaaactgacagaattgccaaaatttagggactagacttgtaaactttttctttgcgtgttcatctttaacaagtggtgattctttcagtaatctaattggttgctgataattttatttcatattctgcatttcttgtgcccaaaatcaggttcatgtttcagcttcagaatgtctactggaagtcatgaaccttgccatggacgtcccttcagttggcaccatcaatgaaggattcaaggacgagctgcttcatcagtacgagatagagaagaacgaaggagcaaagtcaatattaaaaaagtgtgtcaacattcttcaagactggaaatagtaaattgtacgagctatagctgtaaccctcatttatgaaattttgggtggatgaaacatttactatgtatagctcgtgcttggtgtagtaggtccacatatagcgatgacaaaaaaactagtacccttaggtgaaatccgttacggattgaatttttaacacgatgagggtggatagcaagtatctatattttatgaatattcataatttgaaattacttaaatgtctttcattatattttaaaattatctagttttttttttttttttgtttttttacctgactcgtgtnnnnnnnnnnnnnnnnnnnnnnnnnnnnnnnnnnnnnnnnnnnnnnnnnnnnnnnnnnnnnnnnnnnnnnnnnnnnnnnnnnnnnnnnnnnnnnnnnnnnnnnnnnnnnnnnnnnnnnnnnnnnnnnnnnnnnnnnnnnnnnnnnnnnnnnnnnnnnnnnnnnnnnnnnnnnnnnnnnnnnnnnnnnnnnnnnnnnnnnnnnnnnnnnnnnnnnnnnnnnnnnnnnnnnnnnnnnnnnnnnnnnnnnnnnnnnnnnnnnnnnnnnnnnnnnnnnnnnnnnnnnnnnnnnnnnnnnnnnnnnnnnnnnnnnnnnnnnnnnnnnnnnnnnnnnnnnnnnnnnnnnnnnnnnnnnnnnnnnnnnnnnnnnnnnnnnnnnnnnnnnnnnnnnnnnnnnnnnnnnnnnnnnnnnnnnnnnnnnnnnnnnnnnnnnnnnnnnnnnnnnnnnnnnnnnnnnnnnnnnnnnnnnnnnnnnnnnnnnnnnnnnnnnnnnnnnnnnnnnnnnnnnnnnnnnnnnnnnnnnnnnnnnnnnnnnnnnnnnnnnnnnnnnnnnnnnnnnnnnnnnnnnnnnnnnnnnnnnnnnnnnnnnnnnnnnnnnnnnnnnnnnnnnnnnnnnnnnnnnnnnnnnnnnnnnnnnnnnnnnnnnnnnnnnnnnnnnnnnnnnnnnnnnnnnnnnnnnnnnnnnnnnnnnnnnnnnnnnnnnnnnnnnnnnnnnnnnnnnnnnnnnnnnnnnnnnnnnnnnnnnnnnnnnnnnnnnnnnnnnnnnnnnnnnnnnnnnnnnnnnnnnnnnnnnnnnnnnnnnnnnnnnnnnnnnnnnnnnnnnnnnnnnnnnnnnnnnnnnnnnnnnnnnnnnnnnnnnnnnnnnnnnnnnnnnnnnnnnnnnnnnnnnnnnnnnnnnnnnnnnnnnnnnnnnnnnnnnnnnnnnnnnnnnnnnnnnnnnnnnnnnnnnnnnnnnnnnnnnnnnnnnnnnnnnnnnnnnnnnnnnnnnnnnnnnnnnnnnnnnnnnnnnnnnnnnnnnnnnnnnnnnnnnnnnnnnnnnnnnnnnnnnnnnnnnnnnnnnnnnnnnnnnnnnnnnnnnnnnnnnnnnnnnnnnnnnnnnnnnnnnnnnnnnnnnnnnnnnnnnnnnnnnnnnnnnnnnnnnnnnnnnnnnnnnnnnnnnnnnnnnnnnnnnnnnnnnnnnnnnnnnnnnnnnnnnnnnnnnnnnnnnnnnnnnnnnnnnnnnnnnnnnnnnnnnnnnnnnnnnnnnnnnnnnntattattaattttaattacataaaatcgagtatttgttttatggaattttcttatatttttaggaatgctatttttaggagtataagatgagaatattatttttggtttttttaaaaaaatatgtttattatattttaatattcatgagaataatttttaaaatttaaaataatttaaataaaaattagtattttttataacaaaattaaaagtaatttaaataaaaaagaaagtcacttgtgtattagacaaatatcagtttcccatcttctagtacgaatataaatattagaaaacatggtaaaagggaaattatagctttctcagacaataataatacctaaaaatactttttaaaaacttgtgacatagaaatatacattctcgttttcattttcataatttgaggataaaattatacatttaatttagtaaaattcattcagactgtaatataccaataattagattaagtaaaaaaatacaaaaaataaagttagatgaagtaatttattaaagatattcttttttaccccgtcaaatcaaattataatatatacacacttaaaagaaaaactgaatttattaaaaactaaaaacaataattacagtgattgcgtttctccgttctcagaaggttttggtcagtgaagtcttctccttcaacaacaacaacaacaacaaggggttgcagtgaacatggatgaagctgaatttcaacgccttctccaactcttccccgttgttcgttctcgggattacactgtacttctgtctttctcctctctctgtgtttagggtttacaacactgccttttccttaattttggatctctattactctgcatctggcttctctgccagttaaagtttcgatttttcagacacccatgttgtgattttcgtaattcacatattgcttctctctgatacaattgtacccttttgcttttatgttggtttaaggtggtagtgttagagtaatgtactgtagtgtctgaattcatgtggaaatttaggtgggtgcaacagactgggttagggtaccataaatatatgagtagggtttagtatgagatattaattaacaaggtcctggcatgaattgggtggattttataagtaaggatgtggtttcagttcatgttgtgaaattgggtaattcacctaggaattgaagttagaggctttggtaggaggtttgagcagtaaggataagattctatggagtgtttgcagatctattgtgtatttgattgaaatggattgattttgtgtttgaggacattcgtctctatgaagttgtcatgggacaaggttgtattcaatttatgattctacctgggtcccttctcatggtttttttaaaggaagtttctcttctaaacgtctggattggaaagctctcctgttttccactttcaagtttcatctttagttgtatttttcttattattatttagtcttttcaatattatttttaggaagatagcttatcctccttcctttgtgtgttctttctcttttcaatttgaacatactgaaatccaaagccatctctgcttgctatggtttgatggatcagtacgataaattaactttttttgttctatgcgtgggttgatgattggaaaatgctagaatgatgttaagggacttgctacttgacctattttagaatttagaggcaaaatcttgacctttcttttctgtatctgggcttcctttgtgctcagtttggattatggagaattccttacagttgctaggattttgcccaggaagttgtcagaaccaattattatctcatcttgttttgatttttatttgattcaaagaagattggaataatttcccatgtttagtccatttacatttgtagtatgcacaacattggcattttatatgaatcaattggttttctctaccttaaatgcttttacacatttggaggactggcatgtgtattagtttctgaacttgagatactgatgcccacagcatactctgaaactatacatgatgcaaaatccaagatttttatttcttagcttaaataatttacaaaattctatatttgtgaatgcattgaagtaccaaattggcaactgttaaatttcaggcagaagcagcatcatccagacaaattgcatctgggtcagcacagaatgaggtggtaatgctgaacttgaatatgttgtatgcattgatgtctgcatatatatttattgttagctaacaaatttgtctctgcaggtaaaggaatggcaagatgcatgggatgaaagggataaggattttgagaagcagggaattaatcaacaaggtaccggggtaccagtatctttgggacttttttttatcaacttcagttttcgagaaagcacatcaaagttcatgagttatatggcagtctgattaattatttttgttataactcataagaaacagaattatgcttttgaaattaatgctatgcttgtgtgaattcttcaaatctacagattcattttggagcaagctaaagtcggaggctgctaggaaggtattctgaaatttacctattattaaatgcatactaattttgttttagaattagcattgtagcacgttattggaaatttgtttacacccttgtttaagtccttcaaaagtttgaatatagtaggccttttaatctcaaatggtgaaattttaattgaaaactaatggcaatggctagatggtttgacttaatcttccataagaagagtttgacgtatggagggataccttggtttccatttatgcatcagttgcttattattttctttgttgattaaacccaaattctctattttcccatattattgaaaattattttttttatttctagttgcatatggtatgtcaataaatcagttgttttgcatcattgcttccttcccttggcaacagtgaccttttacttgatttccatgcccagttgaaattttcatttaatggacctttattttgccgagttttttttgggtactttattatgattattttgtaaagatgaggagagaagcattctctaatctaatgtaatggaaaatgttttttttttttgttataattgagaaatattcttattaatatttctgtgctagaataggtttttcctctctattgcattttctttttcgtaaacctgtttgtgagagctgtagttacatcttaaattaaactattacaagctcttcagacagtagtgacaaaagagataaggtggttatgttatgtctttagtatttctgctgtataagcatactttgatggggatgttattgaggatccatgacatttacctgtgattattaaacaagtatttaagtatcctttgaatgagacacagctcattggttctaatcttccaacaggtgggtccagaagaagcggagagattttgcaaggcgttccaacaaatccataagaaactggtatgtgcaaaataattgtgatttaagtcattgttccaacaaatatattatgaaagatatattttatacaacttggtatcttcttggaaagcattttttgtgaaattgtctaaaaaagttatgcctgaaaagtattattttctatgaaaatggaattttctatatttttaggcgagtctttcctgaaggattgtctttcattgattaggaatataattttgtgaactgcagagacttaagaacattatacatgttttgcaacagaatatagaaaaataagaaaattaacatgtttctaatgaaatactacatataattagaagctgagtttccttgttagtattgcatttgtcgaaattttattttcttgttttattttatgttttccattatattttaggtcaatgaagagttgagtttagatgctgctcgaagcttcttaaaatcatcctagagttctaaagaatcacgcatgctttcgacatttcttatgattaaacaatcagccataaattctttgtactgtatcaaagtattttataatttaatatctgcgacattttgatttgtacttatttatttttattgtattattaagaactagtattcttcccccattaaccccacccctttttttcttcatttctattgtttgaacttcattgtttttatttgcctataagcggtgattgtgatcgtatcagataaagtctgttacagttataataataataataataataataataataannnnnnnnnnnnnnnnnnnnnnnnnnnnnnnnnnnnnnnnnnnnnnnnnnnnnnnnnnnnnnnnnnnnnnnnnnnnnnnnnnnnnnnnnnnnnnnnnnnnnnnnnnnnnnnnnnnnnnnnnnnnnnnnnnnnnnnnnnnnnnnnnnnnnnnnnnnnnnnnnnnnnnnnnnnnnnnnnnnnnnnnnnnnnnnnnnnnnnnnnnnnnnnnnnnnnnnnnnnnnnnnnnnnnnnnnnnnnnnnnnnnnnnnnnnnnnnnnnnnnnnnnnnnnnnnnnnnnnnnnnnnnnnnnnnnnnnnnnnnnnnnnnnnnnnnnnnnnnnnnnnnnnnnnnnnnnnnnnnnnnnnnnnnnnnnnnnnnnnnnnnnnnnnnnnnnnnnnnnnnnnnnnnnnnnnnnnnnnnnnnnnnnnnnnnnnnnnnnnnnnnnnntaaatataaattagcctttttaagataaaaaatcttaatatttactagattattttaccttgggatcattttttaagcggtaaatagactagttatatcatgcaagtgatgatgaataagcattattaaataataaccatactgatttgggaaactagttaaactcttagcgaccatttgttgtattaataatttaatatgttcacacttttacgagagagttgattgtttattttaatatatctattatctacaatgcctgtgttgtccttatacccgaggaagataatatttcaactgaaaactcaagatagttgaggctttcagtagcttagtaggacaggtattaggtgattgatgagaatacaagaataaatttgactagacatttaaaatggattgttaatattaaatttaattataatgattttaaccatttatgtataattataagattaacacttttcatttcctatcatttcattaatatgccactatgtcatgctagttgtatatcttcttttgcgtttattggtaagtcacttttaagttcggttgtcttggttaaatcatgctagcagttgataggtaagtgtcaccaagaaacacgacatttccttctatacctggttatccagaaaaaaaaaatgcccggtttctatgttttagtttattttatcttttgaataagttctctgttttattttcagatgatattgttctataataattacaaaataatgctattctgattaaaattaatattaccaaaagttatgaatcgccacgcatgctcgctgctacgtaaaacacaaatttggcagcctctcatgtctcatttatgatttatccaataatgtatgggattttagttctgtaataaaggtttaatgttactttttgatcaattatgttttggagttgttctgttttaatatattaaattttaaaagtttcattttagtcctttatatttttaaaatgtataattttgatcatttttttcattttttcgttaaaaatgttattgttatgttaatttttaaattttaaaatggtttaatgtcattttgggtccattatgacacattatgttttaaaagcttcattttaatcttttatgttttcaaaatgtatcgctttggtctttttttcaattttttgttagaaacttattgagtcatattttaaattttagaatagttaagttaatatagtgacaactaaaaatcgttactatcttttttatttaaaaattaaaaatcaataaataaagaaaaaatggatctgaaatcacaaataacaacatttaatctcatattattattaatattattctcttcattcaatttaatcatttaataatgataataatttcattcaccaattattctcaatcacaatggataagagctcattctccttccgccgcttcgtctctcgcccttgttgccctctctattgcaacctccctacatggttggaatattcagtgatttcaatgagattatatatttacgttgttcagtctatgtagtgttgcattttttacctttttatatcagaaaaaagttagaggagatgattatttttttagttgtttatttttaaaaataaaataatgatagtagtaatttttagtcaccactatgtaaaaattattattttaaaaggttcaatgttagttttagtccattatattttgtagttgtttcgattcgatacattaagttttaaaagttttattttaattatttatgtttttgaaatatatcattttagtctttttaaaatttaaatgttaatagaattctaacctttctatcataatattgaaaaattatcaaaatcatacatttcaaaaatataaaaaaccataatgaaaattttataacttaatatattaaaagaaaacaattgtaaaatataatgggctaaaattcacattaagcctaatatttataaagtagcatgcatgatgcatctttcaatgactatcgctccttgcaacaatgttcacacgtaccacgcatctttcaatgtatctttcacagcctctatgatagttcaattcataaagtaattaaataccacgacgactaaaattgaatttgatttaaagtgagatatttgttgtaagttgcatttggcataaatgagtgttgagcttgagctttgctctggtctgaagcttcatctttattaatggtttagttggtggttgagcacctgtcttggtcgcaccgaccttacgccctccctctctttttgttttttgcgtacaaatacaaaatctgaaaagcattaaacatttccaaattatggaaaggacactcatcatactaaaacaaataatttttcatttgtcagatattacttctttcgttctatattatatgatgttttaataaaaaattgtttcaaaatacatatcgttttacaaaactaatatatcattgaatgtttttttaacactactcttaatcaatatttagtgagagtagtgtataataagagtaaatgagtaattaattagaaaaataaatgatatattaagaaattatctaatattttcaaaaaaaaattaacaaataaataacattccttaattattgtatcaaaaccttgaacatcatgtaaaagtgtagcaaaggaagtattaaaaagatgaataataacgagtgtctaagaacataaaatataaattttttattgggatgtgaaattaatactccaacctaatttcaaatgctaaccggtgccttggaacatatttgtaaagagttacatagttttttcagttcaattatatactgttgcgaaagtcttaggatcgagcaaccaacggattgcatgattgggttgttctccaatgcgtctgcttcacttttacgtgtgttgatccctgaattattggccacttcacacgtattttttgaaaccacacagtttgctattgtcataactatagacattgcgtattcattcaagatacttcaaataatatttagttgaacttccgatcatactaagacaaggtgatgataaaaagtttttggaaaatagtactaagttatttaacattattgaattttctagtatctatctgaattataagttgatggtgtctagggtggaccacttttttaagtggtctattatgtatcataatttataatcattagatttagttaaagtgtaaaatgttatcatagattttttctatcgaatcatctccttcttcccttcctacattacctccttttttcatggctatcgctgccatcacgctccattatcgtcgaatccccttatatcatcggtcaacgacttccttcaaagatataaattgtggtgcatgatggaccatttataaaagtgatccaccctagacatcatcttataagttagtataagttataactagagtgattttcaactaaggaattaacagtttacattaactccatgtttaaattaaattgatataaattagagtttaatatgtatgtactaatagtataaaatagttttacactgttatctaattacacatttccgtttgaattactttaagataattattttaaaagttaacaaatttatcatacattgtgagttatgattgaatgactgtgtaaaattttggtttaaatgcaattttggttttcttattttgttcaatatacaatattggtttctttattttaaaattgagacatttggttctcctattttaaaaaattcataattttagtcaaatcttcaactttgtctacgttaatttcttttattttggtctaattgaattctagacctaatatattcatttaaaataccatcaaaaaataatttaataaatcggattgtaagaaataaaagtagaaaaaattaaatattaaaccaaaattaatagacaaatcaaaattactaattgtgtaaaatagttagaataaaattatatttaaacctacaatttttcacaccctcaaagcatagttttttctctataaatgactctttcttttcaagttcaacgcaactctttgttgtattaacacctatgtttattttgaagtgtcactcacctaactagtcacctatctaccaactgaaaaccagttcctctttctctgtctttattgaattcaaattatcaaacaaaaagtcaatgaccttttccttccctttgttcctactcttcttcttcatctaccccctccacttcataccccttcctagttaattcctctttccattttctccaatttctagggtttcctcaactcttttcctttttccaggtctgtctgcttcttccaattctctattttctttcctcttaaaggaacttgcccaccaaagtctcaaattcaaataggaaaaaaaatagaattttctttttctgcactcttcattgagtatgattgttttccattgagtgcctttttgctttaagtttatttatttatttatttttatggagcttggtttcaagtttctacagtgagttccctttttgtttttctagtcaattgtgttcagcagcaatttgaaatcccaaaggcacaatttatctttatgatcttaaaagggctacattttctcatttgatacaatgcttccagataaaaaaaggctttgatttgatgttgagatgagatactcagaacagaacaagcaatttttttatgaccttatggctgatgaattatatgtgattgatcacttttttgactggctatccttatttgagttggtggacaatgggggaatgaaaatcacttcacacatgctttaatcaacacaaatgcggaaaggttgtaagtggaatgcagctcctttacattccaaccacaaatcctggccctattacagcacgaaagcaagttggaagttattttttgccccctacaaagcaacaaggagttcaggattgaaaattaaaacatttctaactccatttcacttccctcctcattttccatttgctcagacaatgtgagcaaccattgtctgtgtatgtttggattcacgttggatgaactagaatctcgttgaaatagtagctaacatgattttaagtgtccactttttcatacaagcattgtctatgcatgtttgaattaacattggaccatctagaattacgttgaaataccagctaacatgattttaagtaaattatcccgtgtttgatttcttgttgagattggatctagaattaattttgagttgaaacaattttacatagcttttaagttgaatcgagaatttatattgagttttactactagtatgcttttatattaaaaacatctaaacataaatcaaatcacttcaaaatcaattatgtaaatgttcacccaaactcactgaaatcaattgcaactaattatgattcttctttcactgttttttatatgacttggcatcatctgtggaaaatgaaatttataaaaggcaactaatttatcttgcaattttaacacaagagtataacctcccattgaatatcattatgtgaagataaatagaagcatgatgtgcagatgaaaataggcctctcattcgatgcacagtacttactctctcacatcttttgctagctccctttaacccaaccaattcgccatgtcaagtttggaggaaccacttggtcttgacaatttaccaagcatgaataccattgataggattcagaggttctcatttggttcttgccgtcctagagtagataacttgggcatgggaaactgctggattgaaggacgaagttgcagcacatctaatagctgcaagtgagtcaagtattgcaacttaagttagagacttgatacactttattgatctatcattcaaattcaacctcctttttccctcttttatgttctaatcactgttgttgtatattttttaatctgttacctcctactatgtccgtaatatctttctatctctgtgcagtgaagatgatgaagagtatacagcagagacatttccatggaaaagacaaacaagagacttatcccgagacgactccttcagtcaaaagtctctgaccaaagggaggaagtcaatgaaatttggaatgattgatgattcattctctgattgccaaagcagtccaaaatgccataccaaagctttgcaaggtttggattataaggtaattcagtggctgcataatcttcaatactctgttcaagttttttcagctactaacttagctatctacaccttgcctcctcgtgtttccaattaagtaatatattttaaactttctattgtctgtttattttatcacatttctttgtctagtaattagcatgttttcaatttttaattggataatggctatgatgcagtttctgaatagtataccaaagtttgtaaagatagtagaagttggtccaagggatggattacaaaatgagaagaacattgtgcctacatctgtgaagattgaattgattcatagactagcttccaccgggttatctgttattgaggctacaagctttgtatctcccaaatgggtcccacaggtattataatggctttaccttatttgttgtaacttgacattgatgatttttaagtgatgggtagagtaaaatttctccaagttgcttgtatctgacattagttctcaatctcatggatcaactggtgtttactatggatgcttttgaatggctactatcattggataaaatccaatccatttatagaattctgaatgacttcaacagttgttatccttatgcattccatctgattttaaataataatgtttctttgtcttatagttggctgatgcaaaggatgtaatgcaagcagtacatgacttgagaggcatcagattaccagttctgacccctaatttaaaggtagaataatctagataaccataaataggcagtcatacattcagatctctgacctgttacattcatagggttttgaagctgcaatggctgctggtgccagagaagttgctatttttgcatcagcttctgaatcgttttcaaaatcaaacattaactgtagcatcgaagagagccttattcgtttccgagctgttactcgtgctgctaaacaactctcaattcctgttcgagggtacgccttttattttctttttaattattttaagattacatcaaataactgtctgcttcaatatctgtattgggaaagcaatacctttcacaaagtggccaggtcaaggtctagtagttggatgcatgaaagtcccaatgattgatgttgttaattttactgacacactattctgtttctattccataggtatgtatcatgtgttgctggatgcccagtggaaggaccaatccctccctcaaaagtggcatatgttgctaaagagttatatgatatgggttgctttgaaatctcccttggtgacacaattggagttggcacaccaggtaacaaatttgatgaattttgaacttctaaagtttaagtgatccatgcttgatacaataattgtggtggtggatttgtttcattttgttggtagacaagattctctattcttgtagaccttttgaagtatgaactttataaggtgaaaatgccaattcttggcagaacttggggatgaatgtaaaactaagtgctttgcattttactatttgtcattggtttctggcatatgatccttgtacttagattgtttcccattcattttgtggtgttcaggaactgtagttcctatgcttttggctgtgatggctgtagttccaatagataagatagctgtccactttcatgacacatatgggcaatcccttccaaatatacttgtgtccctccaagtaagtcatcaactaaatagcttggacttttgacaagcttgtcttttagtgtgtaaaaaattatttcatttttttgtgtgttttgttttggcactcaacaatcattaagggatgttaatttgtatttaaacagatggggattagcacagtggattcctctgttgctggtcttggtgggtgtccatatgctaagggagcttcaggaaatgttgcaactgaagatgttgtttacatgttgaacggccttggtgtcaaaaccaatgttgatcttgaaaaactcatgttggctggggatttcatcagcaaccatttggggaggccatccacttcaaagactgccattgccttgaaccgtgtcacaagtaatgcatccaagatatcatattaactattaagtttaccataaaaatttatatcaatatggcaatatgatcactctacatattatgttcctagttctgcatgctagtagcagaggaataacatgttcactctcatggatgagttttggttttgggaaggaagaaatatagcgagtacaagttgcttatttgaagcttagcttatcattgtacaacaaaagtttttttttcttgcccgaatcaagaatcgtgaattgtaaagataagcaaaatttatttgattagtcataatatttttggaaatatatctaagtttcatggaaataattaagtaacgtgatatttttaccagtgtgattatttaccgcattaaataatctaatgagagtaatctaatatttgtatccaataaaaaactttcagaaagttagatttcacctcgtcatgagaataattttgtggaaaaccaaaaacctagctaaaaaaaattcccagaaaacattctttcttggaatgctatttttaaaatagatatggaaaacaaagattcttaatttaagattttcaaaaaactaaatttatctctaccaaatgaccctaaactgttactctccttcacaacttctttgcttagaatatatttaatgatttcatgatttgattgttgtatttggtgtttgttggagtgttaattataacttagttgggatcgcttcaactagtttaaccttgctagctccttttttgcccaaaagaatgtttataatacataagtttaatttagcattgggaaataacaaggaaaaatcgggggaatctaatggaaatgagaaaattttacatgatatgtaaagtttcgttataataattattttaaaagttttattaatatgattttaattgataaaaatcttttatactcgcagtatatagaaattaatctcaaataaaatttcaacacgggttcttttaattactatttataaaggaattcaaaatattttcttatcaaaacaagttactgaagaattgaacccgaaaatatttcgtcatgttgaaaatattttcaacttagaacaaaattctttctcgtgaaaagttcttgtaattttgattaaaaaactgtaaccagaaaactcttatggattgctatttattatttattttatgtattttttctttttagttttggttttagtttttcataaattatttttgttgattttttttagaaatttatttttaaacaatatctattactattatttagtgatgatgttaaatacattttaaaatactatatcaacaaccacagacttttaaactttataagaaacaaaaatataaattgaaagactaaaataaaacgcacgatatatgcaagagagtaacaaatagtagtattaaatctatctttttcataaattttacccaatcatgtgcatgactatgggtgtgttttgaacaatattctaatatataatcaacaaactcatttttctgggtcgagattttgaacacaaaatggaaggacttgttgaaagtaattaaaagatttaataaaaataaaataactttccacagcctggaatagaatcaagaaattcaacatcagaattttccaaggtttgctactgcggatgttagaacttgcaaaatttatatatatgcaatgtgctaaccaaagttgatgccaggattaacaaattgattaattatgtttttgtccttatatatttttaattttgtttttaatctctaaataaaatattttgtgtttttcttcttatacttttcctttattaattcacataacaatgttttttgatgatgtaacataatttgtcacatcatcagagtttaacaaaataattatatgtaactttttagtaaattatatttttaattattaactagtctgacatcatcagcagatatctaaacaaatgaaagattaaaaatataatttatcaaaatattacgtattatcctattaaatttttttattacttaacaaattactaagttgttgatgtggatgttacttcattaaaaatcagttttgtgtgatagtagagactaaaaatgtttaacagaaaaaaaaatatagggatcaaaattgctaaaaaattgtttagagactattattattattattattattattattattattattannnnnnnnnnnnnnnnnnnnnnnnnnnnnnnnnnnnnnnnnnnnnnnnnnnnnnnnnnnnnnnnnnnnnnnnnnnnnnnnnnnnnnnnnnnnnnnnnnnnnnnnnnnnnnnnnnnnnnnnnnnnnnnnnnnnnnnnnnnnnnnnnnnnnnnnnnnnnnnnnnnnnnnnnnnnnnnnnnnnnnnnnnnnnnnnnnnnnnnnnnnnnnnnnnnnnnnnnnnnnnnnnnnnnnnnnnnnnnnnnnnnnnnnnnnnnnnnnnnnnnnnnnnnnnnnnnnnnnnnnnnnnnnnnnnnnnnnnnnnnnnnnnnnnnnnnnnnnnnnnnnnnnnnnnnnnnnnnnnnnnnnnnnnnnnnnnnnnnnnnnnnnnnnnnnnnnnnnnnnnnnnnnnnnnnnnnnnnnnnnnnnnnnnnnnnnnnnnnnnnnnnnnnnnnnnnnnnnnnnnnnnnnnnnnnnnnnnnnnnnnnnnnnnnnnnnnnnnnnnnnnnnnnnnnnnnnnnnnnnnnnnnnnnnnnnnnnnnnnnnnnnnnnnnnnnnnnnnnnnnnnnnnnnnnnnnnnnnnnnnnnnnnnnnnnnnnnnnnnnnnnnnnnnnnnnnnnnnnnnnnnnnnnnnnnnnnnnnnnnnnnnnnnnnnnnnnnnnnnnnnnnnnnnnnnnnnnnnnnnnnnnnnnnnnnnnnnnnnnnnnnnnnnnnnnnnnnnnnnnnnnnnnnnnnnnnnnnnnnnnnnnnnnnnnnnnnnnnnnnnnnnnnnnnnngaactgatccatgtgatatataagtctcgtaagatatgctaggtcattttccgtgtaaactaagataacaaaactaaaaagatagaattcaaagagccgttgaattcaagttgagagatgtgttaaaaaattaggttaaccataaaagggtttttcatatgatgtttaattaaaattggatatataataatagtatagatattaatttctggaataaaaatatgaactaatatgagactgaaaaccttttgaaatattctcaaaatacaaaacactcaacacaagaattgaataggaaattttatggtattttgagtattaatatcaaaagggtgtgactctatggcacatgtacaaatcgtgtattaatgtaatgcttatgattttttaattcactgtcataactatagggctttgaagagttctcatcccaacaaatcttaagtttcttagggaaaatgttgaaggagaaaggaatggaggattgaaggaaaccaaaaggaaattaactagatgagaaaaaaacgaatacgaggatatggaatttcaatccttatcctagttttggaattattattgaaagaaccttaaatttggtattttccttacttacaatattttctttctaatgtctttctcgagggaaacaaacaataacttgatgtctgtgtttgtttaaatttaagattattgagacaaaaatgttctgacatgaatccccttcaatatgcagtagtatgtaacccacatacaaagattctggtcccaactaccaagcatgcctttgctgaaaattgtttcccaagacgggagacatgtgatgccctctcaccctagcatcaatattacagtgtcttcttggccaccaaatgtgattgtaaacatgtaattcatagatcatctaaaaattatgttaagttaggcatttgtgtgattttagataaatgcttacgtgattgatcttaggttgaaaagttgattatgaatctaaaattatttttgaattgaaacaattttaagttgaatttagaattttagtagtaacttgcttttagaatataaaaatttaaatataagtcatttcacttcaattttgtataacgaatttcattcaaaatgatatttgtaaacattggccaaaataatgcatatacataatctttgatattaacactgttacggaggcaagatcttatattctgtaggttgaaatattcaaaccttcatcaagataactgtcaaagatatgagatgtggtcattatcttcccgtaaccgatatctccgcatatcaaggagaacggttttatgctcaaccgcatgacctgagatcatgggtctcaactgctttgccaaagtccaggtataaataatcctctagcaatggtgaacggtacacacacactctgaactctctcttttcccttcacacctgcacacacagcacccccccccccattgtgccgtgttactccgtgtgatcttcttcctcaagttgcttcatctgcataagcctcttgagagagagagagttgatcctacataaaaacatccaacgccattgttggacatttctgttctctccgagcagaacagtggcgccgtctgtggggaacgataaatttcgagtcccaccatctcttaatggctaaaagaaatcagaataccagacgtgaagacccacccaggaatccgattccggaggaggtggtagcagaagatgcgttgtcccacacatcatcatcccgtgcggaacctgcaacgcaagtgccggccaacacaccaccggccgagcaagaaaactctcaacgtttcatccagagcgctctccaatccctgttggctcgaatggagaatctggagaagcgttacgaactacaatgccaggaagacatccaacagctgatcgctcagttggaggatcgtgacgacagaagacgtgaggcagagcgtcggcaaaataccgacgataggcgtgaagaagttcgtacagaagccgaccatgcaacagcaagaaggtcgggaccatcgatgtcgacccgagcagcaagaaccgatcaaccagagcttgttgaccattccgaacagggaaaaacacctcgtccacagcacgaggttcaccattcatccacggccatttcatacaccgcgagggagagactgacgggagaagtcgcccgccatcccggacaaggcaatggcatatataggaggaagtatagccggggccaccaaaataacagcccgttcgttgaccacatagtgaacgccccgtttctggaagacttcgatgggtctttcctgaataagtataatgggagtcaagatccacaagtacatatcgacgaatttgatatgcagatgtgcgtgcggggaatcgatgaaccggttatatctcggatttttgcgacgaccttaaccggagccgcccagacttggttccactcgttaccgccaaggaccattcgaaatttcgaagatttcggccagaagttcttgctcaattttgcaacaagcaagaagcagccgaaatctgagttcgctctgggaaagatacgtcaacagaacggggagacgttgcaaagctatttggatcgatttagagaagccgcattacaagtccacgggctggaagagaatgtccatgtctaccttttgtcggccgggctcaatggatcctcccgacttgccaagtcaatatacaaagacccggttaagtccctcaacgagttcggcatccgatccaaaaaatatctggaattggagcagatggagattgccaattcggccccgaaagataataaaaaaccgacgtcgccgagaaaccgacgaccagaaaatttccaagtcggacaaagtagccgacatccagctattctcccggcaggccgacctccgcgaggatttctcgacaaccgtcctaggtcagggaaatatgaatcaaagtttgaaagatacactccattgagcgctagccggggacaaatttggaaggaggtggccttcacggagatgagaaaagtgacccgacctcctccagtggtacggaaagaagggatggattatacccgatattgtgattttcacaatgggccgggacatacgaccgaccagtgctgggaactccgagacgctatagagaggttcgtgcgtgaaggtaagctgcgccaatacgtaattcgaacccaggggcaccaagccaagaggaaagcccaacaggagaataaaccacgggatgacaagaagagtaagaaggatgacgagttcccagaacccgagttcgaatgcaatgtcatcgcaggaggattaggaggaagcgatacgtccaatcaacggaagaaatacctcaaggaggttatgtcggtaagagaccgacccaagttcaaagaagccggcggcggaaatagtcaaaatgacacacccccgttgatttatttctccgacgaagatctgaagggagtggtgcccggacatgaggatggccttgtcataacaggaactgtcgccaattttcgagttaaacgtatattcgtcgacaacggcagctcggccgacatcatgaattggagcgctttcaaaaagttgaacttgaaggaggaagacctgaggccatgtcaaactatgctatatggtttcaacggtgaaggtaccggcttaaagggggtgattgacctccagttaacacttgggacgaaggagggcttcaagtcagaaaaggtgacgttcaccgtcggagaattcccgtcaccatataacattatcttggggcgaccgacacttcataagtgggacatcctgatgtccacaaagcatcagaaaatgaagatgatagggcacctcggcaaagtcatcacgatttgcggagaccagagagaatcccggcagtgttactataacacgattagggaaacagagggcggcccgtcatcaccacctcgaattcgacaagaagagcaaagaggacccaggatcgagaagcaaccatctcggaaaccaattaatttagtggagctcgacatgcgagacgtggaggaatggagacccgagccggcggacgagcttgaaaacgtccagatcggcgtctccctgggacaagtcaccaaagtaggtaagcagggcgattcagaaaacaaaaatagactcatccaatgcctgaagaagaatcgagatgttttcgcgtggaaggcgtccgagataccggggatcaagcctaccttttgctgccacaagctagcaatgtatcccggttctaagcctgtagaatagaagaataggaagctcggcccagaaagacgacaggcctcaaccaagcatattgaggaattactggaggctgggttcatcagagaaatccaatatacaacttggctttccaacgtcgtaatggtgaagaagcccaacgggaagtggcgagtctgcgttgactacaccgacttgaataaagtctgtcccaaagattcataccccatgccgagtatcgaccagcttgtagataactcggcaggcttccggttgctatcgttcatggacgcttattcggggtataaccagatacccatgtaccccgatgacagggagaaaacggcattccgaggtattaatgctaactattgctatgaagtcatgccttttggtttgaaaaatgcaggggcgacttaccagagaatgatgaacaaagtcttctcggatcaaatcgggcgtaacatcgaagtatacatcgatgatatgatcacaaaaacgccggcgaccggggaccacatccaagacctggaagagacattccagaagctacggcagcataatatacggctaaacccgttgaaatgcgcatttggagtaaaagccgggaagttcttaggttttatgctgacccataggggaatcgaagcaaacccggataagtgcaaggctgtcctggacatgcaattttcgaccagcaagaaagaagtccaacaattgacaggaaggatggcagccctgacccgattcctaccacgatccgcagagaaggctcttccattcttcaagctcttaaagaaggaagccaagatcggatggaattcaacgtgtgaagaggcatttcaacagataaagacatgcttggcctcacccccccgtgttatcaaaaccagaacctggggaaacactcatcttgtatctctcggtcggtgaagaagccattagtgccgccttggttagggaggtggataaagcccaacacccagtatattttgtaagccgggctctcaagaattcggagctgaggtaccaaaaacttgaaaaggtagcttttgccttgctcaccacagcaaagagacttcgcccatattttcagggccataccgtcatcgtccgaaccaatcaacccatccgacaagtgttgcacaagccggatttagctgggcggatgatgaactgggccatccagttgtccgaattcgacatccagtatgaagcccgccatgccattaagtcgcaagccttggccgacttcattatagaactgactccaacgtcggccactcagcagaaggataaggtttggaaggtgtacgtcgacggctcgtctaatgcaaagggaagtggagctggggtcatagtggaaaatcctgaaggagtatccctggagcaatccctccaactcaacttttcgacgtccaacaaccaagcagaatacgaagctctcatcgcggggttaaaacaagtgaaggagcaaggcgcgacgagggttaacctcttcaccgactctcagcttgtttccgcacaaatagaaggcagatatcagactaaaggccccttgttggccaaatatcttgcaaaggtgaaagaaatcatggcagagttcgacgaagtgatagtcgcccacatcccgagagaagaaaacgctcgagccgacatactgtcaaaattggctagtacgaaaggggcagggaaccataggtcggtcatccagcaagagctcgcccaaccgacgtgcgtcatgatcatactcattgccgacgactggagacgacccatcgtcaactatctagagcaaggagtcaccccagacgaggagctagaagcaaagaaactaatccgagaagcggccatgtacgtaatcctcaacggggaactataccgacgaggtctacatagcccgttattgctatgtttggacttaaaccaggccgaatatgttctctcagaagtacacaaagggatcaacgggcaacatatgggggctagggctttggcactgaaagttctccgagcaagctatttctggccgacgatgaaagccgacgcggttgaacatgtcaaaaaatgtgatacctgccaaagacacgccaaaatagtgtggatccccccttccaagctcagtctgatcactgcaccgtggccattctacaaatggggcatggacttgttggggccatttaaagctacagagggtcaaatgcgatggctaatagtagccgttgactatttcaccaaatggattgaagccgagccgttgtcctctatcacctcagctcgcgttcaaaaattcttggaacggaccataatagcaaggttcggaatcccggcggaaatcgtcaccgataatgggacgcagtttaccgacaaaacattccaagcaatgatgaccggccttcatattaagcatcatttcgcctccgtagaacatccccagtccaacggccaagcagaagcggccaacaaagtcatcctcgaagggctaaagaaaagaatgcatgaagccggcccgaactgggtcgagcaactttattatgtgctttgggcttacagaacgacggcccaaacagccactggtgagaccccgttcagaatgacttatggttgtgaagccatgatccccgtagagatcggccagtcatcatggagaaggcagcacacagcacaagaggaagacaacaatgccgccttaactgccgaactggatttaatagaagaagtccgcaccgccgcccaccgttgggatcttcatcaaaaaagcaagctggcccaaaggtttaataggaaagtgaagccgaggtcctttgaaaaggacgacctcgtgttacgccgagcagatatcggaaacaaaaatgcctgagatgggaagctagcggcaaattgggaaggaccgtaccgagttgtccaaaatctcggacagggagcctacctattagagacattgaacggcaagcaagtacaacggacgtggaacgcggacaaattgaagaaatattacagctgacaatgtgcagccgaggtccatgtgttttcctttagttggcttctagtcggccatagggatcatgggactccaccatgtgtctccctttagccggcttttggtccgtcatcggaatcatggacaccatgtgtttcccttcagttggccttagggcccgtcattgggatcatgggattagtgattttcattagatttgcgaaccgggaacctacacccgcgcaattctattttgaggtcacgataattctcattagattgttaaccgggaaccaacacccgtgcaattctattttgaggtcaaaaactatgtaatttggcatgtttttcgtcaattgattatgtgaaccgggaacatacacccgcgcaaatctgtaattgatactatgaattaataaaatccttaatgcaaggaatatcttcgtgcacgaattatgaacgcttagtcgttgttttatattaactcggtcctgatcaggccggcgtaattattcaatctcgggtgaatcatcagagtttctgaaagaattacatctacagattaatatttacgaatatattaacagttgctaagattgggaactagacccacacattctatttaataccgactaagcgattcgggttaaatatttggctatacaagccgacgaaaaaccgaccgacgagtcaaaaatacttggccgttggaaccaatacacaaagaaagcgaagtataaaccggtggatatcattacgaaatgcaaagaaattgttttgaaagcatataacaaaacagcaaaagtacaaagatataaccggcattccggcccttcaattcccaccctcggccggaccctcggtcccttcaggcgtatctgcaccctcctcctcttcctcgctatcagaagcggcgatcaattgaccgttcccgacatatgatttaaagtgcatacccgaggtattcaactcgatgccagggttcaaaaggcgaatctgatccaaagcattattaaaagaagcttcggtagacttcgacaatggagccctaacaaacgagagttcgccgagcagctcggtccgctccctggtcctcttgtcgttaagggcaagcagctgatcgcaatgatcacgagcatcccgagctcgtccccgacttaccacgagatcctgttccagcttcgtaatggtagagcgtgcggattccagctctaaccgagaggtctcatggtgggcccgggactcctcaagctcggaggtcagtttgaccaccgcttcttgtgccgccttgacatccgtacgagatgtttccacctctttaagagcaagatccaactcctgctgaagtcgctgaatctcggccttggaggcttcaaactcggtagacatcttgcaggcctttctctttagcgaggccaaacttctgagcaaggtggcggtcttcaaacaagacaactccatagagcccacttcctccaactcaggagccgagaaaggaaccaggtcggaatatttcttgggcgcccgaaccacttccaaaagatccacagtaaccccatgagtccaaagagacctgggggacaactgttgaggattctcggcatgctcgggttcaggagaagggacagcgtccgtcagaacaggagcatccgaggtagtattgtccgacggcccgtccaatatgacaacggagtcctcggccaccggagaggaacggaggggagtcgctgcggccccaacagcaacctcggcagaaatagggccggcttcagaaccaccagcagtggctttactccccccccctcggccacctttcgcttcttccacgatttcagggcctcaaggtgagcgggccggggagcacggctgagattcgtctcaacagctgcacaaacatcaaaatatcaggcaccaagaaaaagaaaaaaataaaccaaacgttcagatttttctttggaaggaaataaagactgaccacaccgaacataataagatataggggccaaggatcccgactctttgtatgaaattattcgggcggcagaagtggcatcagaatccgacaattgagcttcgtcggttcggtaggaagcggaaggaaggtcatggtgggcagaagaccaatacaaagggaacctccaagattccgaggaagacccaggggggaaagcaaaaaaaggttgttggccgggctcagctacaactttaaaaaacttgtccttaaaccccttgaaggactcagcatacagggtaaaaagccgacggtcaaaatgacgatcgacacgacctcgaaacgaagtccatccctttcggtcggcaggttctttgcccgaccgactagtttgaaccatgaagaaataaaagaataaagaacatgtgcaaggaagttctagtttttggcaaagaatctcgaaggcttgcataaaagcccagccgttcggatgaatttgagaaggggcgacttgcaggtgatgtaacacttgcatttggaagtcggttaagggaaaacaaactcccaaccgagtaacgacatctttataaaataaaaagaagtcggggtcagtcccctctcgggaagaacaaattggttcacccgggaggggaaggcagacataaaaacctccttgagccccgaggggaatcatagcaaggtcctcggaatccatggtcgaggtgtgttgtaacacctcgtgggttacccaggggaacctacctgttaaagcaggaggaggaggtcgagattgagacccggtcgcggattcccgaacggttctggcccgagatgagtccatatttacctacgataataaaaaagagaatcgttagtaaaggtacctggaagaaccgtctcaggacgggaagaaagagaagtcggagctagacgggcagactcttcaacaacacttggcctatcaacaaaggtcggcatcccagtactatcacttggtcgggctgaaggaatgttgggttctgtgggaacaggcttacgaacccagacggggttgtgacgacatcgatctaatactctctcggcctgcctatcatggtctatactggctagatatataaattcctctatgcaacgtggacagtgttcatatcgaatcactgaatccggttcgggtatcgggtaggcttcggattcatcccgagcagcagtatcgggaagaggggaaaccctaggggacgccctagattgcagagcaagaagtgctggcctttgtcgggatgatgatcctaaactagaaggtcctaaactagaaggtcctaacctagaaggccctaatctggaagggttggggggtcttgaaagggaagctttggaacttccgggggcagaaggagccctaagcatggattttttcttttcctcttcagaaaggggcaatccaaaaagccaaaaagcagtacgaggagaaaccgttttacggatttcctcttcttgttcaggggtatacttcatgcttaaggctaaggaagggagaaaagaaggtgaaagacagagcaaaacaaccaagaaaatgcaaagactgagcaaagaaatatcaatgacgaagtacgaaacagtaaaatggcagattaaagagacgcgcggaatacctggagaggaggaaggaagaaaggttgatggtcagaaacgagcaactcagagaagcaatgaggaagacaatagcaatggagactaaagctaggaagaagaaacgaagcagaaaaagcgcagtaaggagagaatgcagaagtgtagaaggcagcgataaatgagaattaaaagtcaggttaatagaatgaaaacggaaaaggcgcattaaatgagaaagtaaccgccagaattcgaaattataaataataactgttgggtgtaggggcaaggctgtcttttagcaccagaagttatgattgaatgtgcagagaaaaaatagattgacaagacacgtggcgataggggaataaaagacgttccattcccctacgccctagtagcacagactgcgttgaaaaggcgacgtatagctcggcgataatactgaagtgactaatgaattgacagatgatatcccgacaaggggcaaagtcagtacgcaacaatactgatcatggtcatatcggcccggccttgataatgtcggctcgggcaatgggtacctcggataatgtcaaagttaagtcaggttggatagtgatcacctcggaacggtctcaatcgctttaactcagatgaagataacctcggctcggatatcaatttcctcggttcttcgacatccttttgagcaaatcatatcggtttgagcgcaaatcatttctgccaagattactcataggaggcatgataggcattcctattatgcatcccggtcatccagaatgctaaatgaccgggctgaggggcatctgttacggaggcaagatcttatattctgttggttgaaatattcaaaccttcatcaagataactgtcaaagatatgagatgtggtcattatcttcccgtaaccgatatctccgcatatcaaggagaacggttttatgctcaaccgcatgaactgagatcatgggtctcaactgctttgccaaagtccaggtataaataatcctctagcaatggtgaacggtacacacacactctgaactctctcttttcccttcacacctgcacacacagcaccccccccattgtgccgtgttactccgtgtgatcttcttcctcaagttgcttcatctgcataagcctcttgagagagagagagttgatcctacataaaaacattcaacgccattgttggacatttctgttctctccgagcagaacaaacactatatttcatttcagcttatgttgcgagttaatgatcacccatgatcgacaattagcattttaagccatgcatcatgtttggaagaattcaaggaaaaaacgtgcaagctataaatgagagcttccatctggatattaaaaaataaaaaaaataaaaacatgttgatgatgcaaaataccaaatacacacatttagacttgtcagagcaattaaaaaaaaaaactgaaagttcaaaacagttttccgcagcgggattcgatcccggtaattcaactctaaaaactagaattatctgtgtgctactgcagaagttgtaacatttattgcaaagtacattataaatagtcattttaaacagttgataatatagcaaattaaataagcattccatttcgtcccaaaagaattacttaatctaatttggcctttgaataaaaagttactaaatattctttcaatacaacaaatacgagataatagttttatttttctttttagtatgaaattaatccttaaaatagtgaagaatatatcaattctataataaaatcatgacacaaattgatcctataaaatattaactcgaataaaaaaaaaaactaaagtgtatatcacctttatggtccgcgccttttctgttttcttctattcttctgtatatatatataggccatgtttatttttcttttaagaaaaataattattttttaaagctctttaaaaaataaatttttcggtaacttcaagctaggtaagttaaattttacaagagcaccagaaacatttaccccagtttaatttgtgggcatgctggtcaagaaattttgtctttcataggtgttggtctttttggaataccaatttactttgtgtcattgtgtgatcatgtgcttgctagctcgtggcaacactcataggaggattcatcctcctacgtatcatgcgaaatcctctaataataacaaaaatggcaatggcatgttaaacaccccaaatgccatcatggacttgtgcttacaaagttttctatatttaccatgcatgttacacagattatctgtataacactcccaaaacttaattatggcattatcaaagacaaagctaattcatcatgatgagggacacccaccactctcaaagttgaacttaagaaagggagctaaaatgatcatcttctggtcgtgttaagtaagccttgacttcttttttctcattaaaaggaaaaaaatcatacaaatttgttgagtacattagactatcattaaggcaaggaaataaattggtgcacaagcaaaatcaaataattataagacctcttttttactttgcttttggttcccttttttaccggtcaaagtctcgtggctccgctctaccataattgggatctcaaatgcttctacttagaataagtgacatggtttcataattggtcatggctcctagaatgaatttatctctagctaactagcttcaggtaaatttcttaaatagttagggatgcatggggccttaacttattgttgctataatattattgttggttccatacgacaatagcagtgattgaatagtaattctactcatatgagtgtgtagctgtacccaagctagttcaacttccatacttttcactttcgaatgcacatagatatgattcacttccgtttgggttgatcacactttgactatcttgtagtttttaactcaaacagtgtctacgtctcaaaatatattgaaatctttttaaggtaagctatgtaatgcttaatcattgaatcttgaattctttatttaaaaccaaaatactgagaatgttacaattataattagttaccatgctaatatcactttcacctttgataatcccctctaataacttatcaactatttcaaacaatatttattttcatccgttacttttaacaggcttaagaaaatacggtagcttataaattattagcttataacaaaataagctactttaaccataaattctattatggtgattaattacttcagggttttcatcgggttatttcaagatctcaccctaaagagtcaaagactcaaataaagtgattagaaaactacataaattctagtgaatcataacttaaagtatgtttgtgtctatttcttggaatgtgaagtaggagcaggaaaggaatgacctgtctccagcttgttcatcgattcccattttccgatagtgattacagaaattcatgtttagatcctagtgaaatactaaaaaccatgctatcacattcaactaaaataaaacaaaaaggcaaaagcttgtaatctacaaagtagattttccaatatattttgtcaagtttttattgtcataaagccaaggggccatccaccatgggagtaaaacaaattaaaaaaatgttcacaaccaaaagccaagaactttaatttccccttttctaaagcgagtaaaaacaacatcattctttgtaagaaaaagattcatgtgctcgttattaacatttacatggcttatttgtcaaaccccccaccagtttgaccaaattattatttttccactgttctcaggctgaaaaaaataaaaataaaaaaggcttgaatcccgacagattgttttgtaaatgtacacagagatcttatgacctatgaatcatacaatatgctagaataagactaaatagcaagatcaaacaattgtgaaattgcaagattcaaaattaacgttagtatttctagatttcttccgtgcaaaagaattactctttcaaaacctaaaatctagtgtagcatttgatcatccttcaaatatgctcaactagtacacaacctttttgtaaatttgttgtttgcagtcgcatatgaaccctagctaattgattttggtttaatggttaaaacctaaaatctagtgtagcatttgtaaacttttggttgaaaatttactctttcaaaacctaaaatctagtgtagcatttgtaaacttttggttgaaaatttactcttgatagattactgaaagtatatggagctaaggcacacggagacacaattaattaaaattaaagcaagttgagaatacaaaagtcaatgatgtcgagtgccacatatgatcacagtttaacataattagttatatagttcattaatggctctttctacatattttcaagttttaatggatatttttaggttaaactgtactttagcctgcctaatatacatcgtcaaaattcaaattaggtctcctttttttttcaaatttaatcttctactattttaattatataattttagtttgtgttaacttaacatttgatgtgtaataaaactattgacatgatgttttattgtattatatatgatgtgaacacattcatgttgatgtgatattctattgtatttttatgttaatatttatttacctcaagttaaaatatatgaatcaaaagtatatgattataataatggaataatcaaattgatgaagaaaatagacgtgtgaaattggaattttgatagtggaaaaacttaaaagtgtaattaagtctattttttataatacaagttatatgataatgttctgaagtttaacaaaattttattcaatttcttctttaataacctatatttgagtttgtggataattgtgttaaggaagttaaaagaacaacaatttacggataggatttattatattttttgaactataaaaattgaaattattataaaaaatttataataacttatacattccatttgatcaattttttttagtgatataatttatttgatgaactgacatagacagatacacaattatattgaagttcaagacctctctctctctcatgcagtgatcacacagcaacatcacctaagcaagctccaacagaagcagcaaaggctctctcttctgtctctctctggtccatagttgtttcccaagtagtaattaaaaagggatccaaacacattctgcaccatatttatttgcattaaggcaccaacccctatgcacagtcattgactctactcattttcagagctcacacttcaaggttactcacactatcgaattcaaaataatccaatccgcatacaagtttgccaaaatcacaccctgaccaaaaaggaccaccacatcagaccatcacatcacaccctcctccaaatcaactagtagtacgtatcactttacttcccttcctctaagctttattattttttgtttcaaagtatttttagtgacaccctttttgaatcagatccaaaagaagctactagtttaatctgtttctttctttatgggggtttgagccaattatataagttttccatgcacgatctgtgcctagttgagagcatgaggctgatgagtcaggcttgtttctcaattctactgttgattctgttcttgttcaaaatcccatcatctactgctaatgggtatgcaaaatctcaaagctttagaactgagcctttgtcaaatcttagcccctttaaaggaaaatcacgacagaacaccggtgaaggtggtagtgaagcggttcttggtgatgagaaaaggataatctacactggtcctaatcctttgcataacagataagtggaaatttatagttctgaaggatctttttttgccttgtttatttcaagctctctctgtaatctgtgtatatataattttgtatctttttgagtttttttacttctttacatgttctttctcccatttcttttcttgtgaaagtttgtgacatattttcatggaccagtttcttctggtgtattgtcaataaccgtatgtaagaatgcaagttatgttaccacgaaacatctcaaagaaaataattttggctaacgtgtttccaattccataatgtttttggaataaaatttaacttttatgtatagacagtggaaaggtttttttcatttttgttctgtctaagtaaattagaaataaagtttaattcattgacagtgtagacactttttaattataagtgcatatactatttttttactctttggaacaagggccaaataaagacaggaaatgcaatgatgcatcatggatcatttggctggcattaatggagctgttgtggtgtagtgactgtttaatgtttaacagcttatgttaatctatgcctttttttgtttttatatttccatgcaaggagaataaagtacgcagacaactcctgctatatcttttacacctttgttcatataactatagtttatggttagttaattagtttaaatatattgttaatatgatacgattcttgttcagtccaagtaggtaagaaattttagtcaattttgctttggattttgggtgcacctgaagttcagaatccagagatttattaaaaaaaataaaataaaataaaattgaatatcatgttcatttaaaacagacaaaactcgaacctgaaattcagatgatcagaacttttccggtcgggagttgaacgcggaattcataattgaatttaaccaatgggccactacagacactttcatattttgatgcaaatatttatttatatataagattttttttaaataataaaaataaaatatgataatttaaaaaaaaatattccgcagggggagttaaacccggaattctcaattgaatttaaccaggtgtgctactacagacgctttgatattttaatgcaaacgtttaattatatataagattttgataaaacataataaaaataaaatatgataatttaaaaaatattccacagccgggagttaaaaaaatatgataattttgatcatcaattaaatctaaacaaacgtgtgaaagaaatctaaatcagttggttaagtaaaagtatgagttattgtgtatgatattgtttttgattcttacggatcaaaaccctaatcatccgaagactactatcaaatggactgaaacggtgcaaggcattcttaaaggaaaaattcgatgcatctatggttttgaggatgaagtttaacacagtagtaaagttatgtcttgaagacttgttaatcatgaattcgaattcgaaaatagtctttttacatatgtaaagataaggttgcatataatatctcttttctttatttgcatatagtgcgaaagtctttgaacaataaaatatgtaattttattttattttatcaatgattctagttctggcaacttctactatgcttctccccacctgccacgatattcattttgctgaagccttggcctacaggtgggccattgaattatctgcggatcttatgtttagcaacgttaagtatgagagtaattgcatgcccctagccaacactttctttccctattaatagctattttgatggttttgtgttgggattgtgctattttgcgtagaagcacatccactcattatttatctcttgtaaataggcaggctaatagggttgctgaaactttggctaggctatcctttttgtttaatgagttccattgcattgaggagacccctccccaaattgtggatattgttcttgatcatgtattgactcaaggctttttctgtttcttaatatatacatctgacttaaaaaaaaaaaaaaaaaactttgtgtaatacttcttattttttaatgataattattgaatatattttgtatttttatttaatttatttttttgtatgatgactaataaaatgtgttttatatttgcatcaaaggtatttatttcattttaatagtttttataaaataatagaatttattcattttttttataaaactattccgtagcaagaagttgaacccgaaattcatctttggaatttaactaggtgtgctacttctgatgttatgataatagaatgtagacaaatgtatgtatggaatttgtttttgttttttattgttaatgcagtaggttcagactaagtttataaggttttttcaggagtttataagcttttttaattaatttaaattttttgataagttacttaaaaataatttataaaaaaataagctagtttataagttattaattttttcttctcatttttatacttagtattttgtttaaaatttcattttatctttttatttaatttaaaaattaaaaattaaaaactctcttatctttttttttcactgtcggaaaaaactcgtttattttaatgtcaaattatttattttaatgaattattacattgttttttatttatatttaaaatatttggttactaaatcaaagttgataaaaaaaaattatatgtactccattatatagcaataaaattccaacaaaaagggattaaataatattatgttcttgttatacagataaaaaaaatgtttaagaaaaaatataatttttttaatttttgttttaaaataatattattaataaagtatttaaatgttaaaaaaataattttaaacaatgtaattctaacaaagtttatttaatttaattttaattttccaaaaaatggaaaaaaataattttaccattttttataacacaaaattttaaaaattattttcctactttttaagatgataaattattagaaataaaatttaaatattaaaaagtattaaattatcagttaactttatcaaatatttttaattaaatccactaacttgtaagttttgagttaacttttagctttttaactctagcttatagtttataagctgaaagcttacaagctagttttattaaacattaaaaaaaaaatcataaagttccaactaaagcaaataattttgaatattctactttgcggaaaagaataagttaatagtttttttgaagtttgttgattttcttttccagcgaaaatttgaagccaaccaattttccgaaactagctagacagttttatgtagatttgtcaaaaataataatatatactctaatttattaattaaattaatttaatgatatttagttaaataaattaatttgtatataatcaaacacataagaagaaatagtattataatatttgtatctttcaggagaggaaagagtaatttatttttatttaaaagtagagatttgtgtaaaaaaaatataaatattaacacttgaaatatacaattacaattttaatttaattaaactataacgagctactatttataaggaacttttatatttttaagacttttaatattgtagctccttttaaattttcaaatattaattactcttatgtgctagtgtgatttgggtgacattgtaattcaccacaaggaccttaacctctaattgggccttagggaccccagcctccttagtttctagttcggctcaagatataatcctttcatattttttcatgtctcaaatggtcagatttgccttttttttaataataaaaaaaaagtcaaattttcctttttcaagatttagttcatattaatattttcaatccttacataagaaaaaaaaacattttcaaaatccaaccatcttcatttcaacttcaaacttaaaaatctccgcattgcaaatatctctacaacatttattgaattagagtttgtttacataagtttatctaaaaacacttttagaaaaaaaaaataagaagaagaannnnnnnnnnnnnnnnnnnnnnnnnnnnnnnnnnnnnnnnnnnnnnnnnnnnnnnnnnnnnnnnnnnnnnnnnnnnnnnnnnnnnnnnnnnnnnnnnnnnnnnnnnnnnnnnnnnnnnnnnnnnnnnnnnnnnnnnnnnnnnnnnnnnnnnnnnnnnnnnnnnnnnnnnnnnnnnnnnnnnnnnnnnnnnnnnnnnnnnnnnnnnnnnnnnnnnnnnnnnnnnnnnnnnnnnnnnnnnnnnnnnnnnnnnnnnnnnnnnnnnnnnnnnnnnnnnnnnnnnnnnnnnnnnnnnnnnnnnnnnnnnnnnnnnnnnnnnnnnnnnnnnnnnnnnnnnnnnnnnnnnnnnnnnnnnnnnnnnnnnnnnnnnnnnnnnnnnnnnnnnnnnnnnnnnnnnnnnnnnnnnnnnnnnnnnnnnnnnnnnnnnnnnnnnnnnnnnnnnnnnnnnnnnnnnnnnnnnnnnnnnnnnnnnnnnnnnnnnnnnnnnnnnnnnnnnnnnnnnnnnnnnnnnnnnnnnnnnnnnnnnnnnnnnnnnnnnnnnnnnnnnnnnnnnnnnnnnnnnnnnnnnnnnnnnnnnnnnnnnnnnnnnnnnnnnnnnnnnnnnnnnnnnnnnnnnnnnnnnnnnnnnnnnnnnnnnnnnnnnnnnnnnnnnnnnnnnnnnnnnnnnnnnnnnnnnnnnnnnnnnnnnnnnnnnnnnnnnnnnnnnnnnnnnnnnnnnnnnnnnnnnnnnnnnnnnnnnnnnnnnnnnnnnnnnataccgatacttaaaaaatacaaatagaccacgtcggttactttccttttaagatttttatgtgggaaccaaaaaaacttacttaattttctctttcctcaaatagtgataaagttgtccattttatctttttacaattttatcccacaataaatatataaatattaatacttaaaaaggaacaaaaatactcttatcatataactgcatagttgtgtgattcaacattatgctaacattttttatatatataaaacgagctaaatgttggcttctaaagacataaatctaattcacctctcaattcgcccaatttgtgttttcatccaatgttgaaaactaaatcagttatctgtcgtgttcatacttcaatttagttgttgtggttctctaatttctttctctaacgatagatgcatatgacttgttgcttgactttttggtctccacaatccactatcataaacattgatagttctctggattttgggtttgctgtgtgcaaactctggcgttttgtgagggtatttgaggtctcaagtaaaagctacacgggattccttaaatattgtacactgtacaatatatatttaaaatttaaaattttatttttaactccaaaagctctattaaaaaaataatctaaaattaagtaattcttcatcttcatcatccatagattaagattagttatttattataattatgaaaaatattatcattgtaatttattgcattgtagacattaatgaatgataactaggttacttattttaatttttattctttatatcaatataagtatattttagaatttgtgggttttacgacgaaccatggtggcatgtctttaattccacttacaatagctaagaaactcaaaaaagttagaaataatgcgagatgtttaaaatattatgagtaatgatattcatacaattatatttataataagttatacaacaacaaccacattagcacaaaaaaaaacaaattttaataaataaaaaaataaattccctatcttatctaacaggttagcaaaaagaaaatcaaatcttaatttaaaaaagaaacaaatccaacaaccaaaaaatatcgaatttgataaattaagaaataaaaacaatctagtggaatctctcatggtaattttcattgaccgcctaatccttcccgcactcttgccccctccttcaatgatttttatctcctcatgcatttgtttaggcatccaccattaaaattcctttcatgttctgcaattcaagtatcgttaccttttcactgagagtgtataattgaaactcacccaaaacacaaaaaacaactaaactacccacaccttaatggtgctagattgagtttttgtcacttccaatcttttatctcatctatgcatagtcccgacatatggagcaattcaattaagatacgaaatttgtttttctttttactaaaatttgaattttttttgctgatgtggtaattgttgtataatttgttgtaaatataatagtatgaatatcattactcaaataatatttatattttttaaagaaagcactaatccaacttaaaaggttttaattatggatgaatgtatgaacaagtctgatccgtttaagattcgtgaaatatgtgttttagatgtgctggataagtttgatttacaaaataaatgatttttttttaagatatgtattctacttgcaaaaatccgtgaataaatggattgatttgcgaatctaaatattaattgaaaaaaatattttttataaaaatatttttagaaagtgaaaaatgtataaaataaaaaaaaatattttatttttaagataaaatctatcatactaaaatatacaaacattttaaacataacaaaataacaataataacctaaattaaagaaatcaaaatcttaacataacaaattaattaatattattttgacgttaaatttagtctagttcatgagttcacaaataaagcccgataacacgtcagactcaaaagttcaataatattatacaaacttaaaaaaatggttatccgcccaatccgtgaacctaagtctatatatgcaccctagttttaactacttaaactctcctctactctacaatttaaattttaagtcacagtattgaaatagtttaactttgttgttggtctattaatatacttctcctttctggtaaataatatagaatttgttgcacgtaaatttacgtcctacaattttatcttacgcctaagagccaaaattgcattatgtatttcttacaaatttgaaataccacgtacgcctaatcaaagtgcctgcgatgacgctggtaacagaatttattgggatataggcctattcaagagtccagactcctaaggagggtcaatgggtaatggcaccattaatatttatttcctcttgtggcctgtggcaatatagatatctactatgtcacgggtaagaggaccttgaccaaatatgcattaaatttgtttaactaaattgattctccatgacttaaagtaaacattatgctacttcttcttacccagtttgtaagaggagaacaaatattattatgttactccgtatgaaattgagtttggatttttttataaagtctcaaatttgagattaaaaataaaaagttaagaaaagtgactcgatgattatataaattaatcatcaataaaattgataaatatttcacccgcatgtaaaaagaaatataaattttatgagatgctgaatgtgatcgtttggtatacgtttcaatgatacctaaaagggagagaatatcacaagataaattatacgcttggtacgtaatgatgcaaaattgttattaagaaatcataagataacaatagggtcacgataaacagcaaaacatagtgaattaagttgcttagaataaacattaacttcctttgacatttatgaaatgcagcattaataaggccaacacagaaagggacagaacaccataaaaaccctcacaaaagctatccattcaattctggtagacctatgaactttgaagattactttgagggatgacaacaaagttgctcaaatatatataatccaaatcccttcattttaggaacaacaatccctacgctacagctgtttcccaagctctctatcattgtcttgtctttttaacaaaaacactacaccttgtgttatgtcattgcattataagtctcttaagtttagttttctgtgtcaaacatggtggatatgatggatatctctttctccaacgaattctgctacatgagtgcatgtagtttcagccaagagatgtgcttctacagtgcaccaactagtcctagcaggctcaaactaagagcaccctttggttctcaaactggccccacaacaccaagagcagcaacacatgaggatgatgcaaactccaatgtggatgagtttgaatttgaaactagtcgcaggttcaatgttagtgtcggtgacttggacaccgagacaaaccaaaaggatgagaacccttttggtgattcattgcagactatggcatttgctgatgagctattctgtgatggtaaagtcttaccactgatgccacctctcaaacttcctccaaggatgcatcagaatggagatggtagcattatgagcactcacagctcaacactgacgtctccaaggtccccaggatcggtgcttaggcttcggttttcgcggcaaagtttgtggaatgatgactttgatcccttcatggtggctttggagaaggtcagagaagaaaagagagggaatccaagtgcaagacatggtctcaggaggactagatcactttctccattcaggagcttcaacaagaagtctgaaaaaaatgtgggaatatcaaagtcaagtcaacttgagtcacattgttgtgacacagctcagctagtatgtgaacttaagaaagagccattaaagcaagtgtcaggaagaataaatgtgctatcagagcccaaagggttgatgtttgcaaaacaggtgagactagtgggagggagcaatgatactacaaccttggagaggacctcagtttccaaagttgctatggaaacaaagaaagatgaggggaaaagaggtggtttttggagaaggaataagaagagagaaaatataaagaagtttctctttgggactagtaacatgtggaaagccaatgctcatcacaagttagaagataaaatggcagcacaggagaaacaacccttggtgaggaaacttgacatgaaatctgtgaaagcaacagaatcaacacaatgggataaagatccaagaacaggtgagttgaccaaaatgagattggtatgtcacaggccattgccaagattttttctctgcttgggttatgaggaagggaaataggtagaatgtagaagttagctgaaatgaatgctttaaattacaattttaaattctattagtgttgctgtgatgttgcctctactttaccattttatactatctagtgggaaccatatgataccaatgctttttagaaattggttatttataccttgtctagaaattttcccacatgaattggcatataaatttccctaacaatcttcattccctttatagtcctttttttcttcttgcacataacgattgttgaatagacattcatttttctgggaaaataaaacactgaatggtagattaggtgaatcagcatgagcgctgcattctgaggaggctacagacctcaatcataaattattgccaaaagaaaaatcagttagcgcatagagagagcattttttagtcatattgctgatgatccgtttgcatataaacaatgcctgaaatacttcttacatcacttggtacgaaagttgtattgctgtgtgatttcaacgcttaataatctgagaaaatcagagattttaatcattctatatattgtggaatgaatgttctacgccatcagtgcataaatgagcaatttacattgattgaaattacaggctaaacttaaccatgaaaaaatgtgataataaaaaaggggaacgtaaataggtagcctcaaacgctcatttggtttgaatgatgagaatcctatacccctttgtctctaatgcagaagaacctgcctctgctaatgcttaataagaatactagtcttgatataatgctaagtagaaaattaaatctgattagtccaagacttcagaaggccaaatgcttttccaaatggaaatctcagtctcactcttaatctttctgattcctccataaaaaccatctgcttcatttccttcctctctatgatcttttctacttatagttgtcttactccaacgcgagtcaggagtgtactgattgaactctagcaccactgtgtctgcaaccaacaaacacataatgcagtgtcaaataaaccatgtttgaatcctaagaaaggaaatagaaatatacaaaagcctaatgccaagactagaaaaattgacatgttcagttttccatttggcagaatttataactattcaatattcgtggcaaaaagcttttgatggtatgactgcatggtccacaactccatagaaaaaatagacaggtaacatgtgtaaaaactgtcttcatgctgacacaaagtgatgaaaaaaatatgacaatagagttttgcacaaaaaaattccttttagaaagataacagccaaaagcaatgtgtaataatggccaggaagatactgaggcacaaattagtaatttgcattattattattctgttgctattgttatctatggttaaggaaatgttaaatgaaacatcagaccggatagctaagcagagattgtggattattctggtcataactactaatatcagaaaaaggaagtaaacttttaaggcttatagtgactgtggtatccccatattacataacaaaaagaaaacagaacataaaagagaaattgatgtttttctttccattttaacgtagttggccataaatgtatccactgagacacaaaatatcactgtgttggtggaatcatgacatgcggaccatgatatgtctaggggaccaatcatatatcatagctggtggtccaagttttgatatattatcaggaaaggaacctagcccaaattgtggtctggtctgccataaactttacatttatgtaacttttttcaccattaaacctccacaatgaaaaacataataatggtaaataacaaaactttaaaatatttaatccgttaaacagtatttcaaccttcactccaatcctgtgtcttcaaaattctggagcattttcttttatctctctccatttttgcatatttataaactattcagttgaatctaagaaaacataattcatccgaatcctccaatcattcgttcaatcatccctaaatcacatcctccttgcatctgtccactaagcaattttactcagaacataattcaacttgaagggaggaacaaaaatcattgattaaatgaatgataaaacataaaaggcaaaatctacagccaagaaaatataatgaatgataaaacacattcatttaaatggaaaatgcattaactcaccactactatgacaacggcagtaattttcattcccatcgcataactccaagtggcctacaacaccataccaccaacctgccataaaggtgcatttcatcaatctactatcacaaaaagggtagatggatgtaaaggaaaatgcacaattaagattggagaagtaattatttttatcagactcaagattggattccactttcctctttttgtttactccccacagtttgtattcatcctagtttttcttttaatgtccatagccactctttttttatgcttgtttaaatagctctttaacgatattctaaagaccataaaaaactgtaaaagtagaagaatatgttgagtaaaggaacaaaccataaggaaattctttgtttcttctccactgaatctctacatgatcacccggatgcaaatcatatagacaatcagagatatgaagatcatgtggaggagtatcaacaggtggttctcttagcctttcccatggaatgccatgctctactgcaactgcccttcttccatgtggtggatacctgtaataaacaattgatcaataataaggccactagatctatcctctttttcttccttatggaaactcttaaaatatattctctgtctgaattatttataataaaaaaatgatgataacactagctttgtaatcaattccttttgccatttctatttttcttttgaatcttcattactgctctagtcacgttttatttcttatggttaacaattatttaaaatgaaaaataaataaaaaatagtatgattaaaagcatagcatacaatcaagaaagtattgtgtatggtttaccatcaaagttaaaaaaaaaaaaaattgttgcaattgttgttataagaatattcataaaaaaattaatttacctctgcgaattaaattttaacttttaaacaaataacatgaaatatatattctaattctggtgtgtgtatatgtatatacagaacatgtgtatggatgacagaactataatataatgaaaatgggttgagttaatttttaatatttcttctttcaatgactgatgggaacatacatataatcaccaagaatcatgtccaattaaattacctggcctggaaggtgtcagtgtgaggatcatagctaagttcagcatcatagcatgataatataaatccaacatggccattctgcagtgaaaaatgtaacttgtgagaaaacacaacaatcttctattctagttaccataaaaaactaatttgttttactattgaaggtatcatgatagaatataagttttcaatagcaaaaaccacaaagggattcataatcattgatacctcacggttatagacctgagcaggaaacctgaaattgccagtctccagagcaagataccaagtcatgagtgaatcaggaggcaaataactttgctgcttgatgctattatttgcatctaccttggttctcatccatgtaaaaggccaactaagggacacaagtctcaacaagctcctttgctttccatgtctaagagttccaacattccctttggaagcaacatgccatttccactccctataagcagcttgaccaataactctaccccatttctgtttcatgtgcctctcccaaaggtgatcactcacacagctctctcttagggagcggcaaaccccggccatttgacaaagtgaagttgtagggagcttttcaagaatgcattctaacaccagctctggcaagtccaacactgacatatcttgggagtcctcaatattctccacctttgaagacttcttcattagagacattcttgtgggaatttgacaaagaaaaccaagccaaaggtggttcctaaacaacttagagatggacttcacagacaagtctttgtaaaacaaaggggagatcaacctcacttcacttgcccatgatgggagtggtttgagagataggagaggctttaaaaccagaaagaaggagatgcaagtgattaagtagagtagcattagcacttaggaagtaggatatattccacaggtcaagtttggcatatgtgataatagaaccttaaagccaattgtgcaacaccaatggctaacaaggggaaaagcaaaaccaaaatactttgacacaaattaatggcacaccctcccttccttgttggaaagaaacacaggaagcaaattggaaccttcaaaacaaaacaccttttaaagatgggttttttattggttcggtgaaagcccaccaaaacccaatggtaggcctcctaggccaaagttagatcagaataaattaggtatagaaccaatcgaatgaaccatgtaatgctaactctatctcctattggtttccaataaagaggagagaacaacacaaccgtgtagtcaatctaaacagctgtcattcaatgaagaatgaagaatctgtatacaatggtccttataaggaggggaatatcaacacagcaagaaatggaggtggggcaaccaagatctgataacaggttttataacaccgagaaatggaaaaaaagatggaagatgagtctatataataagaaccaaatatatgttcagaatctcaaaatcttattggtaagtggataaatcttctgggaatatatatatatatatatatatatatatatatatatatatataattggtgtgtagctagaataaaatagatctagctagttggaacttaagcagcaagaggcccacacaagaccctcaagatccacaaaaacaatggaaccaaggcaaaggtcaatctttggggtggtgcagaatagatagatagagaagaggattaaacagagattctgatgaagaagataatgaatgtgaagggtaggtgggacctcccctcactccaacaaattcttcaccacacctcaattattatcctctcctctgaaaatgcaatcacagaattctctctcttttttttttcttccttcttcctgttgttgttcttgttctgtgtgtggggcaatatagagaaaaattgatggacaatgaaaggaaagggcagagttatttatgaaaaatgaatgggaggctgaggttacgtaagatttttgtggatgtcaaacacatttcagactcttaacatatatccatgtcatcaccaatggctattgctctatcatgcaatcattcaaggattctcataagaaaattatatagataaataactttttttttttaccctaatattttgttgttacatattatttattgattttgttaataattaatttttatcaaaaactcttactgattatttttaataaaattcattttgttcaatcatattttttgcgtctaagtgagaagagaatcaaatctaatattaaacggatgaactacttaattgatatataaataaataaatagcaatgaattttaaaacttattttaaattattattatttttatctccagaaaatcttgtacgctttgtttttgttgtatcaagttctagttggagggaaatatgtctgactagaaaaggcaactacatcggataacgtatataggacaagattcgctaattttaatgttggaggttcgaggtaaggggatttggatccgctgcacctgcgtccactttaacaaacatgttatcgctgacaagtcacaacaagatttcaacattttaaacaattattatcccctctattccttttattttcaataattaaatatctgtcatgaatattaataagtataatcaattatattttattgaaatatttttctctatgataattttatctttcttgcatgtttaatataagaagtgatcaacttatttcaataataattcttttagaattatattttattttatcatttatttttttagattctataggataacattaatgatttattataattattaaatttaaaaaaatgatgagagtaaaaaataattttaaaagaattactttgtaagttaatccctcctgtttaatatataatatgaaaaaaattaagagtagactaagtttaatcaagttgtcaattcgttgacttttaaaaataaaaaagtcagcgattgggttcctgttaggccttaatttgactgaaggaagcatctagaaatagatttacacgtatagcaggaatgttagtatttttatgatgagttataatgcactatgcatgtgtatcattctaaaattatatgtttttagaatataaataaattaaatgttggtcatgatatcaaatttacttcgtcaatgcaagactcgatatcaaagtgataacaagagtttgaccagcatcttgatttttttttaaaaaagttacaaaggtagttttacttttcattacttttttttttcttactagaattaaaattgttcgatggtacgaaactttttgatccattctttttttcgctctttaatttataatgaataaatagaaattagcaagttaaaagtttaatttgaaaaatcgagacattgaatacgaactaaaggattcattcatttatttttcatgtactcatgatgtgacatatatatatatatatatannnnnnnnnnnnnnnnnnnnnnnnnnnnnnnnnnnnnnnnnnnnnnnnnnnnnnnnnnnnnnnnnnnnnnnnnnnnnnnnnnnnnnnnnnnnnnnnnnnnnnnnnnnnnnnnnnnnnnnnnnnnnnnnnnnnnnnnnnnnnnnnnnnnnnnnnnnnnnnnnnnnnnnnnnnnnnnnnnnnnnnnnnnnnnnnnnnnnnnnnnnnnnnnnnnnnnnnnnnnnnnnnnnnnnnnnnnnnnnnnnnnnnnnnnnnnnnnnnnnnnnnnnnnnnnnnnnnnnnnnnnnnnnnnnnnnnnnnnnnnnnnnnnnnnnnnnnnnnnnnnnnnnnnnnnnnnnnnnnnnnnnnnnnnnnnnnnnnnnnnnnnnnnnnnnnnnnnnnnnnnnnnnnnnnnnnnnnnnnnnnnnnnnnnnnnnnnnnnnnnnnnnnnnnnnnnnnnnnnnnnnnnnnnnnnnnnnnnnnnnnnnnnnnnnnnnnnnnnnnnnnnnnnnnnnnnnnnnnnnnnnnnnnnnnnnnnnnnnnnnnnnnnnnnnnnnnnnnnnnnnnnnnnnnnnnnnnnnnnnnnnnnnnnnnnnnnnnnnnnnnnnnnnnnnnnnnnnnnnnnnnnnnnnnnnnnnnnnnnnnnnnnnnnnnnnnnnnnnnnnnnnnnnnnnnnnnnnnnnnnnnnnnnnnnnnnnnnnnnnnnnnnnnnnnnnnnnnnnnnnnnnnnnnnnnnnnnnnnnnnnnnnnnnnnnnnnnnnnnnnnnnnnnnnnnnnnnnnnnnnnnnnnnnnnnnnnnnnnnnnnnnnnnnnnnnnnnnnnnnnnnnnnnnnnnnnnnnnnnnnnnnnnnnnnnnnnnnnnnnnnnnnnnnnnnnnnnnnnnnnnnnnnnnnnnnnnnnnnnnnnnnnnnnnnnnnnnnnnnnnnnnnnnnnnnnnnnnnnnnnnnnnnnnnnnnatattatataaacagaatcgaatttatcggtatttatttaaagcttataatgtacttttttggtcttattataattattatataagaaaaaaaaaagtatttatctcaaaataattatcattttagtttttaaacataatattaattattttttccacttatattcttttatgatattaaaatgatatgggttataaaacaaaaaaaataataacaaggttaattttataaaaaaaagaaatttatctatttattaatttttttatctatgtaaaataacttaaaataacaattataatgaaatggaagaagtaaaaataagtaaatttgtctgcaaataatttaattacgagacatccacagtagctcgcgagaattcgtgaataaatctttcctcatcattaaaaacctagtgagctattcctcatcttgagacacaacgcaatataaccattcctgttaagcaaagttcctatgtagttttgggcttaacaaatctaaagagaagggaagagagagtagaggaagccaacaccatcccatcctaagactagtatcaggcatcaaggggttatctactcctaccttattatcattaatatggtatattagatggagtcacatgcaaaacaaatttgaaaataatgcataaatgagcatctagacaataattactgtaatgcaaaatatattccaccgtagagattttagttttttacttttgaggccttaagtattaatccatatcaaaataaatataaagcagagtaaaatcaagaaagaaaaatacaaaactaagagatgataaagaaatttagaaaaagcacttgaaagtaggcaatgtaaattcatgaattgaaggcaatacctattgcaaagaagagtgatgacagtttttatgaccccatcaagcctcaattttttcttcttcctggtcacatctgtagatatctgaacaggagtgccatttggaccccatttttaattctgcacattgctcgacatttaatattttagcagtgaaaacatcactgtaggtggaagcaatcttaactgcctcttctgccaacacccctgaggtaaacaaatcatcaagcacagatcaattttagagaagcaaaattccctcacagatatgaaactggccaactgcacgccgagaaactacagaactaggaacaataatcatatatcttatacattcaaagtgttatataaagagaactgaatatgattttttcataaaaaatagtttgatttgataaaatatttgtttactttgtaattataataatattacctttttatttttaaaaaatgtacagaaaaattagaagaaaaaataaagtactactttgtaattataaatataaaaaaatgagaatgagaataagaaacattttggtaccaaatttcaccttttgttgtaattataataatatgccgtgtgttctcttggtttctcactgtcgcccaaaacacgtcaatgtcacgtgaattaattatactttagtggattactaataaagtaagttattattatattattgtttattttattttattacattcaaaagtcaaaatgcagcattccgtccataggttagcttcctttcacatatgtgggttggttcatccactccagaactgatcatgatggacagaataataatcttaaaaataatataaaataactatgatttactctcatgttctaatgccaagagctgaagttaaaaagataaaaattagttacattcttctatggaataaatttttcaacaacaaaatcacatcaaatcctagagaaattaataaatagcatatgaataaatttctggtaacaaaggtagatgaagttgtgcagagaattcgaaactatttttttccaacctccactaacactaacataactaaaaggtactaagtgggaaaaaaaaaaggtaatcacagttgaatcaacagtgatataaaatttgaaagacattgaataagtatattaaataaatcacaaaataaacaaagtgctaggaggaaacatattgaaacaccaagagtttctccacacctgatcttgagcaaatcacaaaataataataagatataaacttatttagagatatgtgtgaagttatcgtaaggatacccatatggaagatattaaaaattatattaaaatatatcaatctcttagataacttttttctaaagagaattccttacacaaataagctccaataaattaattttctacatctacctttctcttatctctaactagcatgataataaaatagggatactcagaaagcagaacagggttttcagaggcaaaaaaaattctcaagtttgttcatatggcattaatacaattcatattcatatcatgagtacacagaatttatgtttttaacaacatagtcatgtaaataattatcacccataaagagatgaaattacccatggaatctgcaagtgttctaagtcactcattcgctattctatcaaggaaaatctaccagacaactcaaattagtacaaaggatgtctgcaaagaaatctaaatttgtacagaggcaaaactaaacaaatatcagaaatcattggtccttagagaactttgactagcatgctagctagttggtacatcaaattatccttgtattcacaagaaagaataaggatgaagaaagaaggagttgcatgactctcattcctctaatcttcaaacatgttcacatatgatcagtatggtttataattcatcagtaataagataaacacattttgccacaaagtcacattattcatcaattgaagcaggtgaaagccagagataaaagtctgagacacccgaagaaagctccacataaactaagaccaaaaataaacaaatgcgtaaaacttacatagctaattgtatcatggcctagtaagtaatttgctatggcttttgcaaagatgcttcattcatcttgaaattaaaatacattaacactctctctccctcttgagaaaataaaaacagagacgcagtagttattaacaatcaaatcgatgtctgggacatcaattacaacaatgcagagaaagagattctacgaacacatttgtcaacacaatctgtcaaataaaaaacaatgcatggcaccaattaaggtcaaaatttaactgacattaacaaatcaaaaacactaacaagaaaaaaagaaaatcttacgcagtaatttcttggcgtcctccttgagttccggtgctaacaaagaacccagctggttttcctgcaggcttctgctccttccacaagtgccccgtggagtcaaagaaagccttcatttgcgccgccatcgacccgtacctctgggaaacccaaacaacaccccatcggcggtcgtcaactccgccgccgtaacctctggtatggcatcgtccttgggcggcgccctcatctgatttagcacctcaatcggcaatgtctccggaaccctatacagaaccccttccacaccctccacaccctccacgcctttcttcaacctcttcgccagcccctccacgtgtccgtacatcgaatagaacacgatgaagaccttcaatttcgcgtagcccgagagcgacgacgctgcttcacgtgctggcgggtcgggttcaggcgtgtcggcgttgaccggaggcaagatcggcggcggcgtgggggctactgcggcatcggtgggagcgggagcatcgtcggcgaccggctctggagaggttccagaagaggaaagtgtggggagggggaaggttggaggcaaaatgttggagaaccctagattttaaaaaggacaacacgtatcaaaatatttaaaaaaagacaaatatcttcatagacggtttttgaaaaaccgtttttgattgacaataatactaagacggtttttcgaaaaccgtcttcgaatgatattttctaagacggttttgcaaaaaccgtcttagaattattgtatttatttacaaaaatgccaccgcgtcactttctaagtcggttttcgattaaccgacgttaaactgatgtcgttaaaacacctttttgtagtagtgtcgctcgaataagtcctaagcaattaataggtccttaggtaattatcaaaccctagattttgtataatattttctctgtcccacggtgtaagaagaaaaaatatgttataaaataattgttattttaatttataatttaatattaatttttatttatatattttataatattaaaaatataagctaaaaataaaataaaaattaatgataataaaattaattttaaaaattattattattattattattatcattatttaatttatatagattataatttaaaaccacaattataatggaaagaaatagatgtgcatgtagaaaaggcaagcttgtttgtttaatatggcttggtttgcagtagagagaatcaataatatggaaattatttattgtatgaaagaggaattgttggggggagaaggaatgaacacgaacgaatgagaaacaaagcatgcatgaaaatgatgatagatctgaaaaaaagtgcatgcccttattgccctcacctcactcaccgcataattggaattggacggtgtaaacagcaactaaaccaccgccacagccaccttctatcatcaatttgcgtgttgcttcctttattactttaataataatcccataaccactttcactttcttaataacaagttacccaataaataagaacgagttgtacttgtattaaatacttgtaaaaatatatataacttacagttttgtctgatctaaacggattggaattctctttatttattagaatttttcagcaagagatatataaacacaatcaatatcaaaattatgttcacattttttaagtatatgtttaacttattcttcgtgtgcttaaaaaatttgaacatgattttttgttatttaaaaatcaacataattaatattgcactttttttagagatgattttgattatatattttaaactataacatgcaaaacttataaaaaaaaacaataattaaatgagtttttatatattatatcaataattataactattatgataacgatatttactttcgtctttacatttttagactattttattttttactaaccggatattttaactgtatattaaaaaatcatttcactaacagaaacaagcacactctctttttctgtataacctttttcatttatttttaaaaataagagacacgaaagtaaataatactttgtttattttaattttaacattgattggatattgatatattcttaatattaaaagaaataagtatggggggagggggaatattcaattattggggctctcactttcaaagttttggtgattttgatactgtcattgatgttttgggtcttccttaattaattgtttcattttcaatttttctttgcagagagagagagaacaatgcaatatgcattagatcaataatacatacgtatgaatctcttttattttaaattttttattttttttcatttctcatctcttatcatgttataaattttattaattttttttctttttttgcctagatgtctaataacatatcaaatatttttctatgcattatgcggtttatcacacttcccaatcgtacacacgtgaacatgatgcaatgcaacctatctactacttcggctttatgctgaaaacgacacccatctttataaattacacctatgcaacttgccctgttaaagaatgtgacaccgtcaaatactatcattcaattatgttaatcaaataaactactactcgatcgttctaagtttaatttaagcctattccaaatatgtaaaatcataagagacatcaagtcactattcgatatagttatacagataatgttttcagtatcactttaattcgttttagtaagttgttaatttatggattcatctagataacgttttttaaaatatttattaaaaattataaaataaaccacacttttgagtggttttaacatatgttaaacttcatcaccagtctactgaaaaaatatttttttagtgagtattcttacgatactgattaaagaattaaacaaagattttttttaattgtatgagagtacatttaaaatttacatataaactcatttttttatcctagttagagataacatatctcctattaaataaatcagtgaattatcccgcttgtactgtataactgttggcaaaagaaccaaataaatacaaattaaataagaaattacgcatttggggcaactttgaaactatttacgcatctggggcaactggtcacgcccagaactgggcgtgactggtcacgcccagaaccaggcgtgaccaggggggtagtcacgcctggttctgggcgtgaccagtnnnnnnnnnnnnnnnnnnnnnnnnnnnnnnnnnnnnnnnnnnnnnnnnnnnnnnnnnnnnnnnnnnnnnnnnnnnnnnnnnnnnnnnnnnnnnnnnnnnnnnnnnnnnnnnnnnnnnnnnnnnnnnnnnnnnnnnnnnnnnnnnnnnnnnnnnnnnnnnnnnnnnnnnnnnnnnnnnnnnnnnnnnnnnnnnnnnnnnnnnnnnnnnnnnnnnnnnnnnnnnnnnnnnnnnnnnnnnnnnnnnnnnnnnnnnnnnnnnnnnnnnnnnnnnnnnnnnnnnnnnnnnnnnnnnnnnnnnnnnnnnnnnnnnnnnnnnnnnnnnnnnnnnnnnnnnnnnnnnnnnnnnnnnnnnnnnnnnnnnnnnnnnnnnnnnnnnnnnnnnnnnnnnnnnnnnnnnnnnnnnnnnnnnnnnnnnnnnnnnnnnnnnnnnnnnnnnnnnnnnnnnnnnnnnnnnnnnnnnnnnnnnnnnnnnnnnnnnnnnnnnnnnnnnnnnnnnnnnnnnnnnnnnnnnnnnnnnnnnnnnnnnnnnnnnnnnnnnnnnnnnnnnnnnnnnnnnnnnnnnnnnnnnnnnnnnnnnnnnnnnnnnnnnnnnnnnnnnnnnnnnnnnnnnnnnnnnnnnnnnnnnnnnnnnnnnnnnnnnnnnnnnnnnnnnnnnnnnnnnnnnnnnnnnnnnnnnnnnnnnnnnnnnnnnnnnnnnnnnnnnnnnnnnnnnnnnnnnnnnnnnnnnnnnnnnnnnnnnnnnnnnnnnnnnnnnnnnnnnnnnnnnnnnnnnnnnnnnnnnnnnnnnnnnnnnnnnnnnnnnnnnnnngactgtttaaaaaatacgctttgatcttcattttgcttctttccccagtttccctagtgttctgattcattcttcttcttcaccttcttcatcatctcatgctcataatccttagagtaatcctttaatccccgcaaactgctctctagaactggcgaaactaatgcaccaaagcacttgtaacaattgtgatcagcgaggacattggtcttattactgtccttccaatgtccgatgatgacgtattttatgtcagaatttttacaaggacattgtgatgctcatataatgtagatttgacgatacatataactttgaacagtcgtaatttttcgtatcaatgtccgatgatgacatattttatgtcaaagcgctcgaaattaagagaagtaattagataaacaaagaatggattgcaattcaccgattgaatagataaaatatcaaaaaacgaaaaattttttagggctccgaagattaaaacgcaaatttgagacacttagaggcctcttttggaaaaaagttttgggcaagtcccctttgggaacttgccagcggcttctcctctcaatttcgagcgcgtggccaccggtttcgcatcaatcggacgtcccagtcaaaagttatcgccttccgtaattttacgaaaataccgcgaaaaccctgcacccccattttttgtgccacgtgtcaccatgggagcaaaactggtcacgcccagaactgggcgtgactggtcacgcccagaaccaggcgtgactacccccctggtcacgcctggttctgggcgtgaccagtcacgcccagttctgggcgtgaccagttgccccagatgcgtaaatagtttcaaagttgccccaaatgcgtaatttcttatttaatttgtatttatttggttcttttgcctataactgttgttagtccaaaaaatatttatataagaaaaaaattaaatataaattttttattaaataaattattttttatatgtgaatacatcgagatcttacgtcactataataatattatagttgagaaatatatttttacatattctataaaaatattttttttttacacatttttactttttccgatctcaattttacttaatcactagtttacaactactcatagttcttaagggttgtcttgcaaccaagccaatgttaatagtttaaatgaaagcaaacctatatacacactagtttcattaaaatttctttttcaaaaataataataataatgttccttttgtttccagcacttcctaagttcaattatatagtatcatcaatcaggagttcgcataggccactatgattctcaaaagacgaggaacatttaagaattatagtagaacagtattgcactgatatcttgtaaataattaaatacacccaaataattaataaggatgtatgatattattcattttattttttacactataatattctgatcatgtcattgatttctgatacgggacatatgagacgtataacttagtggcctgtatgtataattttccccctcgaataatatggctgttatatagctaggcaacaatcgttatcattgtcaaaaaaatgcacaacttccctttgatttattaaacaaggtacgattattaagcacttaggccttagctagactaggaacaggcatagctatgattttaagcatcactcactactttgtttagggttcatggtggagataattcaggattttgcttattttattttactttttttcttttgaatttctaaattgtaattcttttagctttgaatattcgttgatttctagatcctccactacctcgcaattgtagtaccttctagcaattgacagttgatacacattccacagatctttagatattgaattcttttgattatcactttcttttccttttttctttctttttacttgtttaatcttgacacccaaacagctcaattaacccactgaaatnnnnnnnnnncattgattcattttcaagtgtattaattattacttttttaattaaaatatattcttactttattgtcaatttgttaacacctactcatttttcacgcaattgaatgcattcctcggcctattgatcatataagtcaattatttgcggggtgagagaaattatctattgcatatatgtaatgttatatcattaaatataattattactccaacaatttaattctatgagtatttctagaataaaatttaatttatattattaataatgactaattaacttaactaatttaattgatcttgataaattagttatttatttcttatataaaagagtataatttatttattttttacttaagaatatgactagctaatcatcacacttatttattttggtattttaattaaagcttaatcactaataaaaaaaaactttagataacacatgcacttttatttgccatatctagctaatcatatcatgatatcgagaataacaaccttgaaaatagagtagtattttttatttgtacataaatacacaaaggacttttgatgattggcaaattgtaaagccaattaaagaccagactgtaacattaaaagggcattgtcatttttccttaaatgattggtataatagagattagataatttcttcattaatatcctaatccttaaactatttgatggtaaaaaggttataagtaatctatgattcttcctaacaagtactcttaattctttaactaaaaaaattcacagtttttttatgcattgcctttttctttgacttggttggaccaacaatagtaattactttgtgctgatgatagtagtgctcagcattttcagtttggaccagatgtaacaatggaaaatcaaatgggagggattggtacacaattgtactcacgcaacattagagtcaagaagtagtgccgtgaccaagcattattaatttaagggattccacaaatgtcaaattaacacttaaacgctggtgacttttattgttattccttcatttttgtttgtgataaaactaaaaagcaatgaatgtagttgagtagtttctgtcctttgagtgtggtcaggtcaacaattggggttggatcgagagagtgaagtctttttctgtcgaattgaatttcaatggtggataatgctaaagcaagctcaccttgttagcacaaaattagtagtcctacaagtttgacatatttgaaaaaaaacattttccttggtctatgaagtggacaacgtggctcaatgggtgcgatcacttagcacaatagggtatgaattgtagtacaaaagtggttcccttgggataggcatataatgtttcacaatttagttggcattgagtggcttgtgaaggtaaaagtaataatgctggattagaacttgtaagttagaattttcatcaaccaagcaattgggttgataatgttgccctttgggtgcataacattttcaagagaaacccggaaatcttatctaaatgcacatgcatggttaaacaaaaggccaaattgataattcacaatgtcactaaccgtaagctgacacgtcctcttttagagaagtcgcttttgtgtgattagtgtttttttcccccttctttttattgtattacttttcattttgggtcatggagcaaatgatataaacaaaattttcatttcttcatgttgatcattagtgaaatagaaagtatgtatatatatgatttaagcatatcctctttggttaattgcttagatatttccacttagacatacaatcttttggtgtttgtcccctaatgtttgagcatctcatccatcaagcccccaccacctttgaactcaactatcccacacatttgtccatataaaattatctctttccctatctatgaatgtgaactgtatatgtgccagatgctaaaacagtcaacttacatttctagattattattcgcacttttagttggtccctgtgaattttttatatataaatataaattgttcgtgtgatttttaaaatgagtatccaattgagcactgtatatccaggcctcttaggcccaatctttctgccaaataaaatccagtaatgcaggatttttagattgagtgggattgggcttgaacgtggagtttggggttgttgcttcctgcattttccaagttactttctgcactcttttcggaatatttttttgacctccgggataggtcattttggaagccaaaaataaagtgcattctgaaatgtaattttacattctggaaggtaaaaattgagtgtaggaagaaatagcaagagtaatatctacaatactattaataagagttaggttcttgatctgtaaaaaaaagagagtttgattcttgagcaatggcttagcattggccacttcttcccgcaccccaacaatcacagcctacataccttgtaaattctagattagataattcggaatataaaaccttcattttgaattaaccctttcatagtaaaagagggtgtaaagtgatattattggaggtgtatgaagaagagacccttaacaataagcaagagaagtgaagggtttttttttttnnnnnnnnnnnnnnnnnnnnnnnnnnnnnnnnnnnnnnnnnnnnnnnnnnnnnnnnnnnnnnnnnnnnnnnnnnnnnnnnnnnnnnnnnnnnnnnnnnnnnnnnnnnnnnnnnnnnnnnnnnnnnnnnnnnnnnnnnnnnnnnnnnnnnnnnnnnnnnnnnnnnnnnnnnnnnnnnnnnnnnnnnnnnnnnnnnnnnnnnnnnnnnnnnnnnnnnnnnnnnnnnnnnnnnnnnnnnnnnnnnnnnnnnnnnnnnnnnnnnnnnnnnnnnnnnnnnnnnnnnnnnnnnnnnnnnnnnnnnnnnatcaaaaagaaaatactttaaaagtgttactatgttttcacttcttcaaaaatgcaaaaaaggttgatttgttcttttcaattttggatatttttttcaaatattttttaagaaaaatgtttactaaattttaaacaaacatattttcacttttatttaaaaataaaaactgaaaacgttcaaaccaaatgtgacctaagtcttgcatagagaattcttgatggagattcttagatacattaaatgtaagacatgagattttagatgcatcaaatgtactttaagtcgattcaaaacctcataaacgaaaacatataatgaagcctttaaagaattgaatgacttaataatagttaacacactaacacaattttgttctctttacaagttagtttatttaatttcattttggcttgtaagtttgttaggccaatatgattataatgtagcggaaaaataattccgcagccgggattggaacccggaaattcaaatctgagaatttaaccaaatacgctactgcggatttgatgatattgcacccaaattgtgtaatttattatataatgtttaattcgaatcatatgcgtttgctttagaaaatttgctaaatcttggtgattataggaggaaaaggaattaccacaacaattagttgacaattatgagaaattgtaaacaaatatcaaattgataggattaaaagaaagtgatttttttttaatatcaaaagcggatttttttgtacgatgaaaaaacatnnnnnnnnnnnnnnnnnnnnnnnnnnnnnnnnnnnnnnnnnnnnnnnnnnnnnnnnnnnnnnnnnnnnnnnnnnnnnnnnnnnnnnnnnnnnnnnnnnnnnnnnnnnnnnnnnnnnnnnnnnnnnnnnnnnnnnnnnnnnnnnnnnnnnnnnnnnnnnnnnnnnnnnnnnnnnnnnnnnnnnnnnnnnnnnnnnnnnnnnnnnnnnnnnnnnnnnnnnnnnnnnnnnnnnnnnnnnnnnnnnnnnnnnnnnnnnnnnnnnnnnnnnnnnnnnnnnnnnnnnnnnnnnnnnnnnnnnnnnnnnnnnnnnnnnnnnnnnnnnnnnnnnnnnnnnnnnnnnnnnnnnnnnnnnnnnnnnnnnnnnnnnnnnnnnnnnnnnnnnnnnnnnnnnnnnnnnnnnnnnnnnnnnnnnnnnnnnnnnnnnnnnnnnnnnnnnnnnnnnnnnnnnnnnnnnnnnnnnnnnnnnnnnnnnnnnnnnnnnnnnnnnnnnnnnnnnnnnnnnnnnnnnnnnnnnnnnnnnnnnnnnnnnnnnnnnnnnnnnnnnnnnnnnnnnnnnnnnnnnnnnnnnnnnnnnnnnnnnnnnnnnnnnnnnnnnnnnnnnnnnnnnnnnnnnnnnnnnnnnnnnnnnnnnnnnnnnnnnnnnnnnnnnnnnnnnnnnnnnnnnnnnnnnnnnnnnnnnnnnnnnnnnnnnnnnnnnnnnnnnnnnnnnnnnnnnnnnnnnnnnnnnnnnnnnnnnnnnnnnnnnnnnnnnnnnnnnnnnnnnnnnnnnnnnnnnnnnnnnnnnnnnnnnnnnnnnnnnnnnnnnnnnnnnnnnnnnnnnnnnnnnnnnnnnnnnnnnnnnnnnnnnnnnnnnnnnnnnnnnnnnnnnnnnnnnnnnnnnnnnnnnnnnnnnnnnnnnnnnnnnnnnnnnnnnnnnnnnnnnnnnnnnnnnnnnnnnnnnnnnnnnnnnnnnnnnnnnnnnnnnnnnnnnnnnnnnnnnnnnnnnnnnnnnnnnnnnnnnnnnnnnnnnnnnnnnnnnnnnnnnnnnnnnnnnnnnnnnnnnnnnnnnnnnnnnnnnnnnnnnnnnnnnnnnnnnnnnnnnnnnnnnnnnnnnnnnnnnnnnnnnnnnnnnnnnnnnnnnnnnnnnnnnnnnnnnnnnnnnnnnnnnnnnnnnnnnnnnnnnnnnnnnnnnnnnnnnnnnnnnnnnnnnnnnnnnnnnnnnnnnnnnnnnnnnnnnnnnnnnnnnnnnnnnnnnnnnnnnnnnnnnnnnnnnnnnnnnnnnnnnnnnnnnnnnnnnnnnnnnnnnnnnnnnnnnnnnnnnnnnnnnnnnnnnnnnnnnnnnnnnnnnnnnnnnnnnnnnnnnnnnnnnnnnnnnnnnnnnnnnnnnnnnnnnnnnnnnnnnnnnnnnnnnnnnnnnnnnnnnnnnnnnnnnnnnnnnnnnnnnnnnnnnnnnnnnnnnnnnnnnnnnnnnnnnnnnnnnnnnnnnnnnnnnnnnnnnnnnnnnnnnnnnnnnnnnnnnnnnnnnnnnnnnnnnnnnnnnnnnnnnnnnnnnnnnnnnnnnnnnnnnnnnnnnnnnnnnnnnnnnnnnnnnnnnnnnnnnnnnnnnnnnnnnnnnnnnnnnnnnnnnnnnnnnnnnnnnnnnnnnnnnnnnnnnnnnnnnnnnnnnnnnnnnnnnnnnnnnnnnnnnnnnnnnnnnnnnnnnnnnnnnnnnnnnnnnnnnnnnnnnnnnnnnnnnnnnnnnnnnnnnnnnnnnnnnnnnnnnnnnnnnnnnnnnnnnnnnnnnnnnnnnnnnnnnnnnnnnnnnnnnnnnnnnnnnnnnnnnnnnnnnnnnnnnnnnnnnnnnnnnnnnnnnnnnnnnnnnnnnnnnnnnnnnnnnnnnnnnnnnnnnnnnnnnnnnnnnnnnnnnnnnnnnnnnnnnnnnnnnnnnnnnnnnnnnnnnnnnnnnnnnnnnnnnnnnnnnnnnnnnnnnnnnnnnnnnnnnnnnnnnnnnnnnnnnnnnnnnnnnnnnnnnnnnnnnnnnnnnnnnnnnnnnnnnnnnnnnnnnnnnnnnnnnnnnnnnnnnnnnnnnnnnnnnnnnnnnnnnnnnnnnnnnnnnnnnnnnnnnnnnnnnnnnnnnnnnnnnnnnnnnnnnnnnnnnnnnnnnnnnnnnnnnnnnnnnnnnnnnnnnnnnnnnnnnnnnnnnnnnnnnnnnnnnnnnnnnnnnnnnnnnnnnnnnnnnnnnnnnnnnnnnnnnnnnnnnnnnnnnnnnnnnnnnnnnnnnnnnnnnnnnnnnnnnnnnnnnnnnnnnnnnnnnnnnnnnnnnnnnnnnnnnnnnnnnnnnnnnnnnnnnnnnnnnnnnnnnnnnnnnnnnnnnnnnnnnnnnnnnnnnnnnnnnnnnnnnnnnnnnnnnnnnnnnnnnnnnnnnnnnnnnnnnnnnnnnnnnnnnnnnnnnnnnnnnnnnnnnnnnnnnnnnnnnnnnnnnnnnnnnnnnnnnnnnnnnnnnnnnnnnnnnnnnnnnnnnnnnnnnnnnnnnnnnnnnnnnnnnnnnnnnnnnnnnnnnnnnnnnnnnnnnnnnnnnnnnnnnnnnnnnnnnnnnnnnnnnnnnnnnnnnnnnnnnnnnnnnnnnnnnnnnnnnnnnnnnnnnnnnnnnnnnnnnnnnnnnnnnnnnnnnnnnnnnnnnnnnnnnnnnnnnnnnnnnnnnnnnnnnnnnnnnnnnnnnnnnnnnnnnnnnnnnnnnnnnnnnnnnnnnnnnnnnnnnnnnnnnnnnnnnnnnnnnnnnnnnnnnnnnnnnnnnnnnnnnnnnnnnnnnnnnnnnnnnnnnnnnnnnnnnnnnnnnnnnnnnnnnnnnnnnnnnnnnnnnnnnnnnnnnnnnnnnnnnnnnnnnnnnnnnnnnnnnnnnnnnnnnnnnnnnnnnnnnnnnnnnnnnnnnnnnnnnnnnnnnnnnnnnnnnnnnnnnnnnnnnnnnnnnnnnnnnnnnnnnnnnnnnnnnnnnnnnnnnnnnnnnnnnnnnnnnnnnnnnnnnnnnnnnnnnnnnnnnnnnnnnnnnnnnnnnnncgaataatcacagataaattgttccccatctttctcttataataataatgatttatttaaagtttaggaatatatttaagacatagtacgattaatttctttaagttatttagcctgttaaaaacctaaaaagtgtaagtgtctagtttgtattggtgaagtctcaactatatgtatgattttgtgttgcaaagagactaaactttgcgacttgaaaagctatatactgtttacaacggttgaaagaagaattgcacccattaagattccaagatacaaatgcacaccaatttttttatttgaacataaaaaaatgtaaaataacattatatatagtacgtatatatgttagagttagagattattatttttttacatgaaagagtttaattttatatagacggttttattgtataattcaccgtataattttacaccgccaattaattagaaattatcattaacataaattttaatttattaattattataaaaattaataaacttattatattataatttatgattaaataatataaaaatattttacactatccatacatacattatttactcaatatattattcttatatacaacagtttttatacaaaccatttttaaaaaatatttattacataacgtatttttttatcttacattcctttttttgttttttatttcttttcttatatataaaagatgctgtgagaagatattataaaaataatgtattactttatataattatttttatctttaacttttttccttcatatatacatgtctaaaaaaatacacttcaaaatcaaagttgaaaaaatattgtcattcatttgaagtattgcaggaataattgtcattttgtagtcactattttggatcctttcttcgtggaagtgttggaattggctccccggtaaataatgtgtaatgtgttacataaaaggggcagcaaccttaacatgttggtggttgttattatagtaaaacaaatttatatgattatattttttttttatttgtggagattaaaaatagtctcaagaggatttacaataactcatgcaccttatctaattaattaagcttaccaaaaaacttattggaaagaaagaagaaaatagaaaaaaactaaaaaatgattaaaaaaaggtcactaattaacaagttatttttatttttgactccagaataagcaaacaactgctttttttnnnnnnnnnnnnnnnnnnnnnnnnnnnnnnnnnnnnnnnnnnnnnnnnnnnnnnnnnnnnnnnnnnnnnnnnnnnnnnnnnnnnnnnnnnnnnnnnnnnnnnnnnnnnnnnnnnnnnnnnnnnnnnnnnnnnnnnnnnnnnnnnnnnnnnnnnnnnnnnnnnnnnnnnnnnnnnnnnnnnnnnnnnnnnnnnnnnnnnnnnnnnnnnnnnnnnnnnnnnnnnnnnnnnnnnnnnnnnnnnnnnnnnnnnnnnnnnnnnnnnnnnnnnnnnnnnnnnnnnnnnnnnnnnnnnnnnnnnnnnnnnnnnnnnnnnnnnnnnnnnnnnnnnnnnnnnnnnnnnnnnnnnnnnnnnnnnnnnnnnnnnnnnnnnnnnnnnnnnnnnnnnnnnnnnnnnnnnnnnnnnnnnnnnnnnnnnnnnnnnnnnnnnnnnnnnnnnnnnnnnnnnnnnnnnnnnnnnnnnnnnnnnnnnnnnnnnnnnnnnnnnnnnnnnnnnnnnnnnnnnnnnnnnnnnnnnnnnnnnnnnnnnnnnnnnnnnnnnnnnnnnnnnnnnnnnnnnnnnnnnnnnnnnnnnnnnnnnnnnnnnnnnnnnnnnnnnnnnnnnnnnnnnnnnnnnnnnnnnnnnnnntcttttcttatatataaaagatgctgtgagaagatattataaaaataatgtattactttatataattatttttatctttcactttttttcccttcatatatacatgtctaaaaaaatacacttcaaaatcaaagttgaaaaaatattgtcgtccatttgaagtattgcaggaataattgtcattttgtagtcactactttggatccttccttcgtggaagtgttggaattggctccccggtaaataatgtgtaatgtgttacataaaaggggcagcaaccttaacatgttggtggttgttattatagtaaaaaaattatatgatgatattttttttatttgtcgggattgaaaatagtatttacaataactcatgcatcttatccaattaattgaatttaccaaaaaaacttattggaaagaaagaagaaaacagaaagaaactaaaaaaatgataaaaaaaaggtaattaattaacaagttatttttatttttgactccaaaataatgctttttttttcttccagaaacatatcatctactagaaaattctaaagaaacgacaatcttgttaatctgaacacaagcctcttctatacaatgcttctcttcaaatgtcaacaaaatcatgaatcagtccaatacaacatacaacattaataacatctttaactcaagttaattggggtcagtacaaaccttgtccaatacaataagctaaaaatcatcatgtaaagttctgctgactatgaagtactattcttgtagatcaaggttacctgggtgcaatctctttttgccacaaagaggaacaccaaagagcttcacagaactattaggctcatcactagaagttaccaaagacttctccgtaatccggctcttagctggtctaataacatttggtgatgaatccaattctaccagcttcagaatagcacttcttcttctttgttcatcataggaagcaggacttacatggttttggatgaaatatatgatgtccttgtataggttcttcatgtgagtgagttctgataagagcatgaagttctttctcctcagtctttggttgtcctcagaaagtgctgttaagatgtcagtgcctgatttaggagatggtaatgggggagtatcaatccagcacatattttcatctggctgaagaagatgtggtggttggtcatgcatgtggtagtgttgttgatagtggtgaggggttttcctcctgtggatttcacatagaagatgcttagctccttttctgaagtattcatttgcaaactcccacctatcagcagctaccttcttgaaaccctgaaaaagaaaagaaaaggaaaggtatatatatgtgtgtgtatgctgtttcacacacatgagttaatcatgaagcttgtgtagctagctaggtaatcataagttagtcttatagttcaaatagtgaaggaaaatacttttgaagtttttatactataaaagattccactttctaactcatctgaattagtattttgattaggctaactttgtcaagaagtgtagcacaaaaaaaataatcttctctgaattggtaatatgattaggctaactttgtcaagaagtgtatcacaaaagcaataattaaggatagatcagaacaaaaaaaagttatatatatagaagagatggattctcacataggtatttagctgcctaacaaagcttgagaagttgttgtgcttgaaatagttgggaagaagatctctagcaaactccgggggcctcttcacaacaaatgtagtttcatcatcaccccaagagacaatgtggtcagtgcgagggtcatcaacaagtttgtatgtctttgttagaaagggagcaggcactgacttgagagattccatagtgaacaccatgctatcttcacacctgtctagtgtgaaagccatcactgaattaccaaagagggctagctgcttccaatattattctttgatggtactctccttttcattcacttttttcacaccaccaagttttaaagaacctctctcactctatcatattataatttgaaaaatgatgcatggacacttatgtgctactagacacttagacagagatagagacaaatgaaagagaaaagtaaatatgatggttaatatgatgtgataagaaaagatagataaaagaaataaaaagtgttcactaagtgtatacactaactatgctgatattcatatatcattactcttataattttacagctttatgcaacagaaacatatgacatatttcttaaataactattctttgtcctaccccctctattatgtctgttgtttactaaatttaagaagcatatgaccatgtctgtaaaaacaatgtatttttctaggataggatataattaataagattcaatgagctattaattagctattgattgttttctcggatgcaatagtggtgggttgtgattcctctagagatgtgagctacttactattttattttggaggaaaaacagtgggatatatttttataagatattctccaaaatttggagaggtgtatggggatatattaatcaaaacttaaaatgtactgagatggggttgttagatcatttcatttgagtttgaagttaaaaaaatttgtaaagactgcataatacagtgattttttatggatacaaagatctcatgtcctctgcaaattcctagaacaataattaaatagaaaggtgatattttaagtatttctttctgtataacacatactaatagtgtggaactgaaacttggaaggttgcgatagtcctccaacttaaagagaaaatacttacttttatgtatattcattggcccactattatatatgaatgtcagaagttgttcaatttgttggtccctccctctcctccaccctcgtctttacttggaaactagaaccaaagcctgctttgctatatatttttttttccaataaaagacgaggtattctcaacttcgcatgctttttggcatctgtaatagagaattaatttgctaattggactgatctgttttgtattaaattttaatcatatatataagttccccagaatgatacctatgtaaaatttccatccaaaatgaatacttagaagccagaaaggaagtatatgactataaggaaacaagccattttatttttgaataatgattctttcatgatacttgaatgttgaaacacatcactatacattatagataaaaaaagaagataaactaaactataaaatgttacatgaaactatatgcatatggcactatttttaatttttcatcatcagatattcatatctagcaagatcattcaagattatcatttacacataagtgaggatcagtagtactgttcttccttctttggtttaatctcatccatgcttcaacaatcccattcaaataaagtactaataaggattgatgggatagaaactttcttagatcacccaaatcatgactttttgatttccagcttgagaaaagtagtgtctcagaaaccagaaaagataaacactgttcaagaattatgtggttgtaattttcctttttttttcccagctatcatgtccatcccgccctttattttctgaagaaataccttttcttcttttatagggatatttgtggggatcactgttgggttgtgatcacgaggatcaccattttaaatcttttcccactacagctatatgtcaaagtttgcctcctgtacataactacagaacataatagaaataaggctattatataaattgtaaacactcaaagtgcttcgtacctagttttcaaggtagaacattctgacctttattcatttttgtacaatccaaagcacacccgtgacctggacatatagaagatgtatttccttctagtcatcaatcatggaataatgtatttatatatacactgcacaattcctatataagtgaatcttctgtaatttgaccagataaggtgtatatatattaatttcaattttcaatgctatgcctaattacattagagaaggaagaaaatgttgtgcacaaccttctagctctggattccattgttggagacattcatcactttctttctagtttgtttctttcttaatttccacactcttcttttctctctcgcttttgctttgaaaatgtatgtgttgaaattaagtgagatacttagctagctccattttctcatccaagcatctctttttgagtcttgaatttttggtggtcaaagtatagctaggaagcctctaatataccctgcatcacactgctaagaatctgaaaggtccacataaatatctcaataatgagaagattctattctaagttaatattaccaacacctacagtttccagtaaaaatgggcaatatatgttgttgcatcacatgatctatctccatccatgtgacccactgcatgcctttttagatagaaagagagagagttttgtcttttatgtatcatgcacaaatctaaatgcataacatgtgaagatcagcatgtggcaactaaattaaaatagagaagaagatgcttccaaaagtgactattattggattaattagcaaaaaggggaggtttgaaagcttagtggtttttgtaaaagttaagaccgaggttaaattgcatgatttctcctttgaaatttgaagaacaggaactgtggctcttcttaaatatatgttcgatctttggaagttcaagagctttgaagaccaataaccatactttttgtttttgtttacgctaagtatctctgaaccgatagtcagagattaaattccttcgaaatgtaaaaatcaccaaagtgaatattttctctccaaacaaagtcttttatatacttgaggaattgaaccccttataacatgcacccacaactgtacttttaacggagggaataaacaatccttacaaagaaaaatgatagctagctataaccgtcaacttaatgcataaaaaaccattgaagtttattagcccaaaatatgattttgttgatcaggctcgtttgcatcatgcatagtactacatatgcataattaattctactgaactcagcttcattatttttcaaattcagttaaacaaaacgaaacataaactaatattttaagttgtatatgatgtggacgatgatatcaaacgtttgttgaggaagttagatccaattcttcttttctttgttgtaataaaattaagaaactaaaagaataaagattaattagcagtagtttaccgtagtcgagaggccttgagtcatatattctttggtattgagaaaatttgaataatatatcaaaatttcattcttttccttttgttctttctggtgacgttactaataaggtaaacattggcaggaatgtagataatacaattattcataataaaatagaatgaaaaataatgtgtcaatacatatatcatgtgtggtttatattttatatatactgcactggcttttcttacatatccacatccttagtggacgagaaactattcttttttctttttttttgaaaagaaaatcttagtggggggttctgatttgatgttttctaccttaataaagtcatacgaatcatatatgtgcttcctgcgaaggagtgcttcattacaacatgaagaattcacctccacatctcagccaaatgatgaaaattcacatgcgcggagggcaatgcaaacaagctttagtctatcaaccatttatatgtaaagtaattgttcctattacttggattttggcatcattacctctcatgcatttgtctagccagtggtgttacgttcacactgtataactctcttttcctattaactaggtcccatgtatataaaatattattttatcgcgcaaaactttctttacattgaaaaagtatccactggaaaatactatatatgtgattgattatatatcattattcttttaatttcattatttttaattacattgtatatatgcacatagttgcattcttcacgtaaaaatgatgataaattggtgtaaggtggtaatgtaagaaaaataaaacggcactaagattaagatatgttacaatattattgtttctttattgaaagtggttttggtttagaatatgactaaagaattattgtcagaagcagtaatcacaacaccaagcattttcctttctctttttctctgaagaactttgtagtatacctaggaaagacaacaatttaggtcaagcagtgtgcagaaagcaaagagcattagaaaaattcagccatggtcgtgtatttaaaagtaaatggaaagggcaatttcataggcttttaacctttcgctctcttccatgtctgcatgcatacattttgttctctaatctttagcaacttaggtagcaacttaggtaccctttgtttccttttttttttttttcccctcgtgacggtcaaagtaaagccgtaatgcatttttgcaatgcaaagtaggcatgccatttaattcctcgtgattatcaattgttcgaatttagctccgatgccaatattttgatttttgtacgtttttaattttatatttaagagtttaacatataaataatttatgggctacaccatttggagacgggataaaacacttgactccttttttcctttcttgtaattttttttcttctaaaacaacattagagagaaaagtgaagacaattaacaaaagatgaatgataatatatttagatcctttccttttgatatattcttcattatccacccgtgtattaacataaagtcctcacactttggattaaaataatctaatagtgtactatctttagatatatgatttcatcatcgctcagcactttatatatatatatatatatatgaattaaatctgttacttatacacacaaaaaattatatttaggtaccnnnnnnnnnnnnnnnnnnnnnnnnnnnnnnnnnnnnnnnnnnnnnnnnnnnnnnnnnnnnnnnnnnnnnnnnnnnnnnnnnnnnnnnnnnnnnnnnnnnnnnnnnnnnnnnnnnnnnnnnnnnnnnnnnnnnnnnnnnnnnnnnnnnnnnnnnnnnnnnnnnnnnnnnnnnnnnnnnnnnnnnnnnnnnnnnnnnnnnnnnnnnnnnnnnnnnnnnnnnnnnnnnnnnnnnnnnnnnnnnnnnnnnnnnnnnnnnnnnnnnnnnnnnnnnnnnnnnnnnnnnnnnnnnnnnnnnnnnnnnnnnnnnnnnnnnnnnnnnnnnnnnnnnnnnnnnnnnnnnnnnnnnnnnnnnnnnnnnnnnnnnnnnnnnnnnnnnnnnnnnnnnnnnnnnnnnnnnnnnnnnnnnnnnnnnnnnnnnnnnnnnnnnnnnnnnnnnnnnnnnnnnnnnnnnnnnnnncaatgtatattccttgacaatgcataattttaaattaattatgcataatatcatttataattttaaacattttttcctttcaagttatactttttaaattttatctatatttagaatatttgtataatataatagaaactagttggttcctgttgaaataaacgctcactttatggaaagtaaatttatatttttgcgcacctaaactacaaccaatttttaagaaatttgagccatatttgaaatcaaattacaccttttttggttaaataattttttgttacaattcaacctctgtaagatacaaaatttattttaaatcatcgtaattcatatgcattttctattttcctttctttttagttttgacaaagtgcatcgccatttaagcattgacgtgttagcaacgggaagttgtactgctatatagcgtcttagatttgtgttaaaaccagtagtacaaaattgtactcttaacggaacatagatcccttcattacaaataaaagtacttcggcgtagtacatctaagcctagaagtaccacgcttgcaaaggctatatatatccacttaatcaaattggataaactcatcaaattgataaaacattattcaaagtccaatgttccagtttaggcaaagacatttccaatatatgtggaggtagagggttctacagggtcgtcctgagaccacatgaagcagattcagattacaagcatatttgtttgtgatcttttatgtgactcagctcatgtgttctcaggtcgcccctgccgaactttctctaccatgatacagcattggcatccaattccaatctattgcgaatgcactcagcacaaatgaaaatggagaagggcaaaagaatgtagaatgaaattcctattgcatgaatgtggttcaggtaattaagctacaggattatctatgtttgtggaattgcatattttaaggccagccatctgttatcttataggtaccataccttataaaagaaatcaaacaaataataataaaaataactagcatggattaaatcctgacaagaactaagcattaagtataaattaaactaaaatccttacagaagactcaatgactagtagctcttcttctgtaagtttcttccaacctccgcctaccatgggacatcctttctccccttgcaatggcaattcattgtttaattcactaaattctttggtctccctcatcttcttgacagttgaattatcaagttgcagaagatctaaaaaggcatctctcttggcaccatgtggggtcaatttccaattctcttccttttctgatacttgattctgttttgcatcatcgataatgtcatcaacaggaagacaacaagatgatacttgattctgtttttcatcatcaataatgttaagaacaggaagacaaccagatgacccaacagcacggggcaacatgccaattggacacgggttccatgattttgccaaagtccaagtctgtgattttttggtgtcacaatccattgccattggttttttatttttcattatctgttgtttaactaactctagctttttagctgcttcgagcatggattcctcaaattggaaaatgttctttgaagttaataaagggctttcatcatctgcactctctaaattggacagactaataagagagaactttcgaattttctccatcaagtagctgtcgttcatcagctctgcaagctgaagtgctgaatccacgagctgcttgttgaaaagttgtgatactagaagacatctacgaagaagttcatgcaaaactctttttggcatatttgcttctgcagaaggaaatttactgagaattccaacaagccatgcaaacaaagaagaaagccaaaactctgttctcgagtgtgaaacccccatatttgggttatctacaaaaattaaaaaagaaaacacactatgagaacaataatgaagaaactaagcgtaataccaaaccaaaatgaaggacaagagaattttaaaactcaatatctgacttcacgttggctcaaggcagaagaaatactaaagggaatccaatcggaaaagactttccattagtagtgcatttaaaaagccctagaaagtatctggcatttaataagtaaataaatggggcatcaaatgacaaaagcacacaagaaaaatacatcccaagtaccccaaaacaaacagatattaaatttcaaccagaaactatacataatgaaaagggatactgtagaaggaaaaaattgctaccaaccttctttatacttcatatcttcccgactctcaatcatatcaaggacttccttaagaaggttcagaagtaattctggttccttattgcacaatttgagtatgacaagcatccaatcagccaaaacattctgagtggttagaccaattgaagcatcatctgcattctcttccaactcggaggaacttaaagctttcaacaaatactccaacaacacagaaacaatctctttggaaaaggaggaatataaccgaagaacatatttcaagatctttgcaatttgtttcttagatcctgaaagtatcacgattcactagtaattatacatgaataccctgaaacattaagctgaagatactctaaaacgaattatttcagtttcacttatttttcatagtaaaataaaaatatccaatatctcaggttaggaatctctcatttatttggtcgatcagctttaaggaaacccaacacttgagttttaaagaaagaaaaaatagaaacataaaaatatgaaatggccaggaatcctcttaaagcagaacgaacacaataaagaaagaaagaacacccactaacaaggtaaaccaatcttttagcataatcaacataggaactctcaaaaaccaacctgtgatttaaacccaacaaattggccaagaaaacactatcctttaagagaggttaagtagacacaattggtgttgcatcctttcttttctcttttattttttgttatgtggcctttagacacaatttacttctcctttaaaggatgacttgcccttcatcccttgcacaccattaattgtttcatggtttagttaatgtaaaacactcatacgaatggttaaggatgagagtgtttttgtacctataattatttagcttgtttttttagtatatataggtgcaagggatttgtaacatttaattcattaagagaaaacataaggatacaaatcctttagagagcacacatgtgagaaataatgtgtgaattatttattgttgtgtcatctaagaccacacaaaatactcttatttatagtgaaaatcagcagggtggtttgttttagcggaagaacatagacaacgagaaacaggtttcagcctaggctaaagtttaggaacgaaaacctgctttgataccatgtgtgaattatttactgtcgtgtgtcatctaagaccacacaaaatactcttatttatagtgaaagaagttcacaaaataaggaaactaaataataatgagtaataaggaaaataatctcatcctactgtaattaaaacatatcaaatcatatatttcctaatcctaataaaggaaataaaggaaacaaataaactgatgatattcataataattagccactgatattccttgattttctaccgataaagaattcatagagaattcttctttgtaattttgttcttttcttattaaagaaattcttctttagttttgcacagtataaatttctctgtctgggacagtttttcacaacaggtatactaaacaaacacaacaaataagttttattgtaataagaaatatgaacaaaatgatacctccggttcgagatgtttgactcttgccaactataagagacaaaagcttattacgcccaaaaagcaattcaccatgcttgacccctttaaaagagaaaaaacacatcataagaattgtaggaaaaatatgcagttgaatgtcatcttaccaacaaaataacccatactgtcttgacttagaatacatttgaatatgatactacaccaataactctacatccattaataattgaaaaatgccttgacatgtgctaccattaccatatactaacattaccaataggctccactttataatgggccaaaggatttccaaccatcaaattttcaaatgggctttcaacattaaattacatgctttcccatgggcacaagttacatgtacataaataaaacggaaaataggaaaacacaaaatagaactcttaatgaataggtggaaggaaggtatttgacttaaaataaacaagtgcaagacaatgattaaagtcacaatatgatcaaaatgaacaaagcttacagacgttttgcttttagtagtgaagaactagactgagcactcccattgactttcaagcagatagctaattcacgaatcttagacttaatttctttgttgacttttgctattccttcaccatgaaagggaattgctttgctctgaggttcccaataataagattttaaccaatcaagtgcctgaaattattagcaaaacatcagatgagtttggggagtgagttaaacataattagtgtgacgggaatagccatacatgttaagaacttatgaagaaattgcccatattcaaatagctaaatccacaaaagaaaaccacgatgctttccatttttatttccagttacattttaacaacaaactgaaatttcatcagaacgaaaaatgaatgtacaacagtaagcgagtaatctaaaagttattacaaacagaaaataataatttttctgttgcaaaatagcatagatttcagtgactactatgcatgtactctgtcctttgataccattaaaggagaaacatgatttctatttcatatactaaaaaatgttatgttacacacagactttgggaaagaaaagttcagtctaataatttcgtgaatgctaagaatgtaaccccaaccaaggaccacacacacttgctaagaatttaattacaaaaaagcaaaaagattgttgagacagatgatcaaacaaaccacgaaatgagtcataccttaacagaagcactacggacaatcttaagtgaaggaagctcacgatgtgatccctctgcaattacagcaataaataagacaaaaagcagggcactataaacacaataaaacaagcaactaagtgaacttctttgactacaatgaagatcgtgtctcattctaccagcacaacaaaactaataattaacaggagtcaaaagaaaacttgttcaccatggcgaatatcaatcagcatgcgtggaataccaatcgcatcagctgccactgctatcgacgccacttctttcttgcgtgtcttctcaacaacacaattcacaagccttgaaaaatcaaaacaattatactttaaaatagaaaaattaaaaaaaaaattattagtgagaagaagaaaaaacataaaaaaaggtatagtgaccactgagcaaacctcatgatagccatacaatacagcatagcaagcatctcctccgaaagagaagcttcattccattgatcatgtctacaattaaatcaaacaaaattgcttattgtgatagtacatatatacattgatacatacatacatacatacatacatacatacatacatacaacatacatacatacataaggaaaggagttagggttacctgaaagatgggtctttgagttgaatttcgatgatggaagcagtgacttcgatgagaactggcaaggaacctcgacttcgccatgcggatatctgagggagcagaacatatggttaggttaggtttgcagttacagtactatgtctatctatattatgaatttgtatggttaagaaagttactcgtttgagaccggaggaaacagagtgaggagaatcggagaagagagcatttttaacaaagagccactcatcccagttcaaccaagggaccaatctatgtgcgcttgatgacgatgatgataactctgtaaccaccttcgcatcttcttcgaaccctaataacaatgccggctccatcccgaacgtgcttccacttctgttctgaaaatactgagtgaaacgccaaagcctcggagctcgagggttttgcgctgtagtcgtaagaactaagaaccttttcttttgagaattttttttataatttatttatatcttctgttcttgttttctaaaataatttttttatttataattttttaccatttaaaaaataagttaaatcaaagtaaattaaagtttaattatcgtctaacccaattagttaaatataatgcttaagttattataaattcctaattaaatcttcaatttctactaatcaacaataataaaaatttaattaattatttggtctctatgcaaacattttttattttttatgatttaatgcttatatcttttatattataacagcacaaggattaaaacataaaatttctattgtagaaaaaaaacataatttttttagatataaagacttaattcatcttgacttaagattattcaagtttaataagagacttttcatttgaatcctaaatatacaattgtattaaatatttatgagaattgttttgctgtctataataatcactaaaactcaatgtgagacaaattgtaggatccagattaattaaacagagaaaatatatttagattaaaaacttattttctgctttcaatagaaattggatgcaataagaagaatgccatacagcaggttcagttcttagggtttagcccaagatatacggtgaaccagggagtcaattcaaggcacattttatggtggtgctacccaaatgtatacactagactacattacaatatttctaacactaatttccatcatcatctatggaactgaataagaatgctcatgcaaatattctcgtaaaattgaccataacgtaatccaatccaataaattccatgtggtttatagctattatactttggatcatcatactttaccatttccttagaatacgagaccgacacattaaataacttcttgagtggtcatgatactaatatcttcttacatataactactttgagttttacagtattagtttaatttcagatcctccacttgattttcgtggtagctaaaactattgtttatttttctccaattgcttttgacacaatctatgcaactgtacattagtggaaaagataaaacaaaatatatttatttttctttatttgcacagaactggattaacatcttggtttttccactatgtcaaatgttgaaatttgactaaaaaaggatatcagaaattttctaagtgcaggctttggctcgctttactggggcctgaagggaatttagataaatggtatcctttttgtccagtccatcaaacagataactaaaaggtggcatttggatgtatctcccagtgccaggagtgacctttagttcattattttcccaaacaactcttcctcctgcaatagtcacttcaatttttccctgagaaaaataaaaactttgaatctggatattgcatgacaaggcttcaattgttgaacgatacacaaacaatcacatgttgaacagattataggtaaaccggtacctttcctcttcttccctcgtagacatttgtgtccagtctggagtggtgagactttgcactcatctcaaagctcgaatttggattcaggatgataatatctgcatcagatcctggcagaatagctcctttccttggatatatattgaagattttagcactgaaatgtttgtagaaatgaaaaacatcagtaatactttgggcatctttaccaaacagcttttttattgccataagaactggaagctaatttgcactttgattaactgaatatataccattcagtgcttgttatcctgacatagtcagtgacagatatttggccagattcctgtgagatatataaaccataagttctagctaaaaggttatgctcttcaccattttaccccgacctaaacagaaagggagggctaagctgtaagttgacatcttaccaccatgatatcccataccaaatgcattctttcttcaatacctacaggttgcattctatatcagtaaggaaacatttcaaaatcagcaagaaagtatttagaccacaaatatccaagactttcatgtgattaccattgacaccattaggcattttccggaagtcatcgattccacgagctttttgggtggaattaaaggcacaatgatcagttcctaccagctacaaattttaaaaaggtatcctttggtcaaataaacaatctaagtaaaacgaataaaattgagctgagggcagcttgaagggtgtatttcatagctgagactatcctgagaaactcaaaccctcatctttaattggttattgaacctaagcctgaatcataatgtgaaacctgcaaaacgccggttgaaagggcagcttgaagggccttatcatgtcctcgtttcctaataggggggctcatgacatacctgaaacatgagaatgaataaggcttatatgttcttaaaattcaaggaaataaaagaacaacaataaaaaaacattgaaacaagtgaaggcacttgctttgctgcaatctcaaagtcaggatgccaaagccaagattcatcaagggctaacccagaggcaataggctctccaattaccctttgtcctgcagcacaagaacaggttaccttattattgcaaaaactaagttatcaaggaacaataacacttcaaatatcacagtggaaatgtgtaaagatccttttgttcatcttcattgagattcaggttcatcagtgatttttttttttttaggactgcatggaaagagggaaagtacacctagggatagaataagtactcctccaaataagagaagtacaaaacaaggagataggaaaaaataaagacaaagcagcaaggcaatccagtctctgtgtatcaaaaatagaatcttcctcaggaagctcttatcacaagtacaaaacagcaatcaaaattaagtctcagactctcaattaagttcaagtgatttgagttgccctcagtttctacactctatgatagagtagagacaacagtaaaacacgagtggatttataaattgctctcaagttaaccaatgtatggatgttataaattcaatcaaaatgtcttccttttgcatttctccctaaaaaagattgcaagagtattagtttttcttcaaaaggatttccaattttataagttataaatcatctactttctcttaatgaatgtatacattaataaaaattgagactaacacgagaaatattgacctgattttcgggctttcgcaatttcttccattgcgtcaatgctcattacatgaaccacatataaaggagtattcacaaaatctgctaagcgaatggcacgagcagttgcctctccttccaactgcacagataacaaagtcaaatgggagaatgttctataaatcacacagacagacatttaaactttgcagtgatcacaaaatattagagaacaaaacatgtaatcaagatgataaaatactggctaaacgtggttaatgagtttatcataacagatgaaagctgaacacaacaaatgtcaaactagggtggtcacaagcaagcaaaatttgatagtagtagcttaaaacagttaatttggctcaagtacagcacctaaatccaattcattatgcagggaggctactaagttgaaaagggaaattttaaatatgaggagtacaaatcacattcacatatgctataggttggtcagacaatgaagatgaaaagaaacaaaaaaatgtccaatattttcattccattattctgcaaattctttattaaaagaacaaaattgagaaattaccactgcaggccttgaaagagcatgcccctcaggaccagttattccaagttctatcattttctgttgcccttcatacacagcatctccattttctgcatggaccatggctacggcaccaagagacttgcattttttaaatccttccagaagaagctcatcattgatcataagaattcctttgtatgccatgaaaaacttaaaagagttgattcctgcaattacaaaacatggatgtactacctggaataaattccttacaactcacccaaagggttactaccacctaatcaaccaaattatcaaaatgcagcaaggaaataataaataacaacctttctccttaaccatgagctccatttctctcgaaacagtttcatcccatttggtaataaccatatgaaaaccataatccatgcaagacttctttgccttcttttcatagtcttcaaaaccagctgtcaaactcccattaagtggtataacgaagtcaatgtgcattgttgtcccaccagccaatgctgccgcctgaccactgaagaagtcatcaaccgttgcagtaaaaccaacatccatatctagatgggtgtgaggatcaatgccccctggtcagttaacaaaaggagcattcatagagtctatcaggcacataataataacaacaataatgatgatgacgatgacgatgataaattaattttcatgcactttttacattgtttaccaattaaaaatcattcgacttatgatttttttaattagttattataaaaatcatcaaacttagcatacatggcaatgggttgctccacacttatatatactatttttgtcatattgttagtcaacagggcatgaagtttacaaaattggacatttatgaagatctgacaacagcccaatatagggtggtccgatgctatcttaaatttgaggttgagataataaggtaaaaaatatgtatactatccacacaatctaatttatttatttttatatataagaatcgaagacagttaccaaggagtttaagccaactcatgctttctaatttaatctaacaataataggtgatgaaatataattgaataggttgaaacctggcatgacatatttgccggtggcatcaatgacagtgacgtcatctccaacctgggaatggaaataaatcatacatcagaaagcagaaagtaacaaaaacgcaaggtgttagaaagcaaattaagcactgttactgctagggggtttcaattcatcaaataccctgatgttaggattaactgcaacaatgatgccatcttccacgtaaacatcagcaatctggtggtgctgagcattcacaaccgtgccacccttgatcaacaacttggatgatggaatttcagttcccgcatcacaaaactaaatcattcgaaaaagaaaatcatgaattaagcatagaactattggaaataaaaatctcagttcagtaatcagtactaatgatcatacccagttaaaacactcaagaatcgaagctctaactctttgataacgtagaacgggataagtaaattagttgagcaaaggtcaacacagaagagaagtaaatcagtgtaacggattctacactgacattcacttacaatttttgtatgtgcggtaataagtttgttgacttttacaataactaacttaaaaatcatatctattctgattaaaattttgtacatcgatagtgcataattaaaatatgtaggaaaacgaagataagatagagaagtgaacctggttggattgtgaaagtgaagaggtaatgataatgaagaaggtaagagagaagatatgaaggaattgtgatgtgatactgaactgcatactgttccgaccagacacactcaactcaagtgtcggagttgctatctcagtcaacgaggagcctgttctgtttggatcgctgctggaaagaacaaaaaataagttgcaatggcggtgcaataatggattgtgctttcgaacacttcagttaaaggtaagtttttttttttttcttttctttgatggcttatatggtgagaactttgtttattttatccggaacagaccttctcattctcaacaaaattaaaggtaagttttttatttatttcatgttttaaaattttcctattagcagtttttgtgtctttttaaaatattagatatttgacatattttttatatatgatatgaaaaaactgttttagctctattaggaaaggtactgttttaagtataatctcattcacctaaggattgagttaattaactggagcggccaacaactactctggtctgagtggaattaaatccaattaccagagtggaattaaatccaattttattaaacaaggtagtcagatttgattaatatagtttatagatatttatgtaggtctcaaatatgtaattttttttattattattaatatgatattttaatcaattgagttaatagaataattatattaaaaataattaaaattgttatatataatactaaaaatttatatatgtaaaaaatatatgattaaaattaattattataaaatttattaaagtgttatgctaataatacgaatgcggcacgttcaagacttgcaatgcccataggaattgacaattattttcgatttttcctctcttgggtgtactaagaaatatgttagatgtagaaagaaaatcccaacgacactaaataaaccgagcccaacccaaacagaaaacaaactatcaggaaggttacttctcttcttctctctcgaattttccctgacttttgtgtgcatcgatggcggcgatcagtctccggaaagggaacacgcggctgccgccggaggtgaaccgcgtgctgtacgttcggaaccttcccttcaacatcacgagcgaggagatgtacgacatcttcggtaagtacggcgccattcggcagatccgcatcggcaccaacaaggacactcgcggaacggccttcgtcgtctacgaggacatctacgacgccaaaaccgccgtcgaccacctctccggcttcaacgtcgccaaccgctacctcatcgttctctactaccagcaagcgaagatgagcaagaagttcgatcagaagaagaaggaggacgagatcgcccgcatgcaggagaagtacggcgtctccaccaaagataagtaattaaatacttccttctcggaaaagcctagggttagggttagggttttcgagactctgtttggtggttatattgtattcttattattgttggatttagtataagtgactatgaattaatgtttacgatgctatcattatttgtgagaatgaaatgaaatataaattcatcggagatgcaatgccttgtggttgttagttaggggttttcgagaaactcgtctctgtatttatgtcgttgttcgagttgctattgaatactagtataaacgtttaagatcaattgtggcgatgtttcttcgagtgcgattcagacgccttgagtgaactgaattgaacattgcttcgaactctacaacgtaatttgtagtgaattgaattagtgttaatttcgttgatgttacgtttgaatatcgatgcatagctgaattcagctttagtttcaagagtggaaagcttatataatgtattatggtttatgcttctgccagcgtgagagagttagcaaggggagagagggaagaaacagagagagagatgaacaaaaaagagtgggatgacaatacaagggtaatttcttggttatttcttttgttgtattttcagaaatctgaagtggggggacttgaacattgttgctcccagctttttgtaggacttttctctttggtaaatttaggtttttcctttctttctcaatgttctgtttaccatctttgtattgaaaatcttgaatgagaatcaatgaaatttgtttctgcaagtcaagtgtatgaggttccgtgatggtttatccttctgttttcctaatctgaatttttttggtgagcctagtgtaataaaaatataaacttaataataataatgaatgtatttgaacctagtgttgaaaaggaatcagtagattcagtcataaataaataattcttttgatttgattcctaagtgagcagtgattacaatacaagatttgttgcaatgtttctcagcatatgaaaaggaaaagtaaaaaccaaaaccaaccaatcaaatacctagcatatgttaacatttctcagaggttggtttaagttttttcccccctctaaatttgtttgttttccaccttgacactgcttaaagagatgatgatgcctgttaaatatctttgcacagtccccaactaaaataaggttgagtcacgcctcttcttggtaccaacttctagggttcctttgttcatcattgcagcaaactcatcgtagttaatccggccatcctgcacagacatacaagtttttcagaatttttcgtagtcatgattcagatatgctgtacagtagtatgctaattgttaagcacatatgctatagaaagttttttgtattcaaactagagaagtgttagcaatgcattctttattattgattgcaatttattgaaaatcacataattttcttctgggtctcaattaatttaatgagtttcatattatgattttgtagttttcgataaactttgaccattaaatactttaatagaaaatgtgttagcaggagggtgccaacactcctcttagaactatgagtatttaattcatccagtataggacttacattatctgcgtcaacttctgaaatgatttccttcatgtccctgccatcattcatgttaaactcaactagtgcctgctctaattcttcaatggtaatgtacctgattatgacaaagccatgagattagaaccttcaacttataaccaatcaatttcaaaaaaggagtggctgatatatattcaatctagttgctttttctttacccgctgttatctttgtcaaagtattggaaggcagtataaagatgatcttctttgttcattcggttcatgtgcattgttgcggtaatgaattcatcataatctatggttccgttgccatcagcatctgcctgtaatatacagaaggaaaataaagaaaatagtcttaagtaatggcatcagagaaattactgatgggaagttattttgtcatatgcagtactttgaaaaggagatataacttacagcttccattaattgcttaacttcctgttctgttagcttagtcccttgttttgcaagcccttgcttgagctcttcaattgtaatggttccactgttgtcagtgtccatccccttgaacatctgcttcaatcccatgatttcttcctcggataggcagcctgcgataacctatactcatatattgatttcacatcacattaattaattaatatataaattttaataccacactatttcatgagtcttgtgatacagtttttcctaaacaatggatagaataatgttcgatctgaactcggccgatgaaatgtaagatttgatttttaaattcttttgtccgatatgatctaaaaccgttccggatttaactcacaaaagctcgcaaaaactgagcttgagtctgaagtaaattttagtttttctagcgcaatttattataatctgtgacttgcatcaggataattagtttgtttttccacttctaactagaatcacgatagtgtaaatatgcacgaagaataaagagaaagctaaaatagcattacccttagagcaactttcttgaattcgttcattgctctgaactgtttgagcctattcagtactgcattgtcaagaggtgtatctggtgcttctccatcctccttgatccatggatgatctgtttttcacataaaataaaaaagggctttattagaattgcattgaaccaatttgtctgggctaaagtaaaattaatttgcaaatcaataattcgtagttgaattcaagatgttcatagaaaggaagtcaatattatacgcactcaaaacttggtaggacgtcagcctctgcctgggatccgaatgcaacattttccttacaagatcttttgctgcaggtgaaatggatggccatggatcgcttgtaaagtctatatggcctcgtaggattgcattgaatatcccattttcggattctgtcaaaccatatgttttggtttcagtttcaaattgtgctgatataccatcaatttaagaagaattctattttgttaattaataagtagctttaagattgagtaaatgaatacaaacctgcccaaaatggaggaacaccgcatagaagaatgtataacatgacaccaatactccaaatatcaacttctggcccgtattttcttttcaagacctcaggtgcaatgtaatatgcactgccaacaatgtccttaaacatctctcctgtcaaagagggatgaattccatgttagagtatgcttcattcgaatttgaagattgtgttatcatcctaagattattccaagcaacaaatatattgataattctgtttacatatagcttaagcaatctcctagctattaatgtttaatcacacattcaatcttatagcaaaaaaactctaaataaaaatcaaagagaagttctattaaaaggtggcactgatggtatgagttcttatcaatatctactacaaaagttttaaattggtgtcacggtgtaattttgtcgtgattcttatattgtaaaaaactacggacaagtgtaatcaataaaatcacagaaattccaaaaatcttgatgttgtagacgaaactgtttcttgtacgatttcttagaatattttggatgaaatttttttggaggatttcttaagtgaagaatttatttcttgcaatttcttttttatttgagcaaatctatatgatagtgagagtttcttaaaataagacttttatcttctacaagaaactatttattaccaataaaaatatgtatttatttaactgttttttctttaatgtcattgtatttaattatttaataattcaaaaaatataaaagtgagtttttaaaaatttcttatcattttagcaaaattgtatataaatttcttacttaggacattttagaaatcacaaaaaataacttaacaaactcaagttaagattttttttattgaaaatgctcattgtagaaaactacggataagtgtaatcaatactatcacagaaatttcaaagatcttgaatcaatcaaattgcagtcacattctgttttttaaaaaaacctttacgcatggtggaatttaattataaaaaacatgacagaagagccaattattagttccatgctaagcaaaccgtttccatgaccctagaaaacaaacatgtcatgcacgttcttccacggaaactaaactaactctctttttaatcaaataaaacatgataataaataaagaaagaaagaagcaaaactagaagagtttctgggtgagaaatattgaccttgcttgtaaaaaacagagagaccgaaatcagtggccttgaggggtgcattttcatccttgttcaagagaaggaaattctcaggcttaagatctctatgaatgacccccatggaatggaaagtgtgaacaatctgcacaatggttctcaacaaggaagccgcagcacgctcagtgtaatgtccctttgcaatgatacgatcaaagagttcacccccagcacacaactccatcaccaaatgaacagattgcttgtcctcatacacattaacaagctccacaatgttaggttgccctgagagatggtgcatgatttgcacctccctcttaacatcctctatatcctccttgttaaccaattttctcttggcaatggtcttgcatgcatattgcttccctgtgctcttgtgtgtgcacaaatgtgtcacaccaaactggcctctccctagctctttccctatgctgtaagtgcttttcacgtcctccattggccttccaagcacggggccgatcgcggccggcttcgagtgcttggaaggaggatggttgggcttagatgatggtggtggggtggttatgggtgcggttgtgcctccgcctccacctccgcctccgcctccattgttgttgttggttggttggttgggttctcccttgtcgtcagtgccattggtgccacctgagcaacagttgcccatggtggaatggaagggagaacaggaacacaagggttgaaggaaggggaaggggatatgtggagagatataggtcaaggtggtgtgctttgagggctgaacaacaatgtttttgttgttgttttctggagagaaggtgttggcatgaagaaaagtgtttgttgttgggaaaggaaaaaaatgtctagaaaaaaggtatggggaaatttgaaagggtgttaaaaagggttgtgaagaatattagagggaggcattaattggaaagattgaagaaattggaaagagtctttggcgagtctcttgctttggaaggttaagagttttattaggacaagggtggagaggagttttcggagaggggaataaaaatggattttgttggtctattattacaggtcaaaggatctggaacaactcagttcaaagatttgcaagttgttactaacatcgcatactaatcttatagtttttgtttttgtagcgaaaatttgctaactctaaacgtgtctgatgagcaatagtcttgattatcttcttttcgatttgagtcaatacaactatgctacttatgatttgtatttcccttgttaacaatttttatacgtaagaagagaaatatgtcataagataaatagtatgatggaaagtgatagaaaaaaagaatgtgttgtagaaaaaataagtaagaataattcaaagtcatgtattattattagtcgctccaatattggtttaatcttattaccttcattaaaatattcataagtgatgaaactcataatgtaatatcatgttaaaaatattatatgactttgttaaaagttcttaagaagcttatttgaacttatattgttatataataacttatgttgaaaattggaagtgattagttaaattgaggaaggaaacttatgataatttgcaagttatttttaataaataagattatttcagtactgtctatttgaaaccatttcatctgtggtggtctcataccataagctcttaatgattagattatttgccgcgacgtggcttattcttttcaattctttttagtttaaaataatcggtatctaaaaataatatataatcctgacgaatttaattcaaaatcagatacttatgttctcatacatgttctctctctatttgttttggatgtcgtatcattcatcaataatactaaatcctttacccgaaatttctcataataattacaaaagctgtaatttgtgagaagcatgttgaatagggaggattacgcagtgtataaacaatcagcaaactgcgagatcaggaagtgagagaaagacaatttaaagatttggaaattacttggcaaaactcaaaaggttgagaaaaacagattttccatagatattttgtcaaatattaagcaaattcacctttgtctcttaagctaatgaaattagtctttttgttgcataatgaaattagtcttccaggtaacaaaaaatgaatgaatttgtattctattttcctcatctttatgtacaaaaagttattttttgtatactgagcaaaaatgcaaatattatattcctaataaaatcgaaggaaattaatcgattggtactttacaaagtttgattccacgttctaagcattttaacaccgctttttatatatggttcttttcttttttaactcaagctgtgttatgaacctctctatgttgaggttgtgcatttagttgcaagagaatggtacgtgacaaaaggttgaaattgaattggttttaaaaattaaaagatcaaattaaattctaaaaaaaaaatagaaaatcaaattgaacctcaaaaataaatttgagggaaaatactaatttaatcaagaaaataacatgagaaaattgaacttgtagaattataatgaatcttaatctagacttatctcttcatctctctaattggaattctctcttctctaaaactaacaaataatgttcaaaattttacgaatgaaaaaaacagctttttatcaacaaaatatttgtttatcactttgaaaatttgttcacaaaaaacagcttatatttttctattttttatctgtagaaatcaaaacaacttgcgcacttgctcaaaacaacttgtgcacttgctcaaaacaacttgtgnnnnnnnnnnnnnnnnnnnnnnnnnnnnnnnnnnnnnnnnnnnnnnnnnnnnnnnnnnnnnnnnnnnnnnnnnnnnnnnnnnnnnnnnnnnnnnnnnnnnnnnnnnnnnnnnnnnnnnnnnnnnnnnnnnnnnnnnnnnnnnnnnnnnnnnnnnnnnnnnnnnnnnnnnnnnnnnnnnnnnnnnnnnnnnnnnnnnnnnnnnnnnnnnnnnnnnnnnnnnnnnnnnnnnnnnnnnnnnnnnnnnnnnnnnnnnnnnnnnnnnnnnnnnnnnnnnnnnnnnnnnnnnnnnnnnnnnnnnnnnnnnnnnnaaaaaaaaaaaacacgataaaaccaagtagtacttgctaagaaaatcataaatcacctcacagccaagaccagcttcacaaaaactagcacttgatatgtagcctcttactcttgatccaaagtaaatacatgttcataccaagagaaatccaattcctaaaggtaaaatggacatcccacaaaatcttgctctcatgtacaaagatggaaagtggaaaagtaaaggactacatttatggcagaataatgtaaatcaatatgtggggactgatggatcaacctggacagcataggcatggattcccccagaaagattgtatactttcctaaaaccctgaaaagttcaccaatcattaaattacacaaacaataaccactttactacaacttgtgaaaaatgagaattaattcctaagttggtcaaatccacttccagatacgaaaattggtgagcaataggtatcaaaaaccatcatgagattttctttgatcaagttgaaagttgaaactgtttatccattagttgtctacagtctaaagcatctataccttgtaagcaacaaacgcatgtaacatgtctataagtcatacaattttacagtataacaataattgtctgcatggcttggaagttgcattgtgatatcaggaagtaaacaaatgatgaggcaaaacacacatacacacacttgaacttgaaggcctgacaaaaagtgggaaaaaaaaaatacctgtgactgcaaccacttggcaacttgtaatgaccgcatgccatgatgacactgcattcagaagtcaagatattgaatgcacagacacacaaaagaaaaaacattgcaaaatcagacccaaatttaataattttgtgcatagcagcaacaagttaactgagcggtctgacagactaaaatattaaatagtaaactattctgacaagaaagatgaatgaatttaaaattcaaaattattgctttgttaaatatctcaaaagaaaggcctctaaaattcaaacttggactgcaaaggcaggaacctattcaaagaattccagtttcaatattgatcaacttacaacctctaaaccaataaaggaggagcaggaggagactagcaacatgaacagatctttcagacaagaacaataaagatatatactcaatcaatttagagaacagtaatcaattagcattagtggtctagtttcctggataccctctaatagaaatgaaatcttttagaagaaaaactgcatttaccatgacatatgtatccttttgagggtcaaattttgtagttatttcaggcccccagcttccaaattgtcggaggggaagaacagtaaatcctggcaaagttgctttggccctgtgcatgttgagaatgtcatttaaatgaagaaaaaacagatcagctactaaaataaaaataagcaacctaggaagattccaaaaactgcagaacaaaagaaaaatagatgcaaataagtgtaagagctactaaatgaatatcccaaccagtcaaataaaagtagatccccttgttgcctttgagatgtcaaaagagcataaacattgaaaattgaaatgctctcaaactttcaatcgaactatatatcttattttcacttttttttaagctcattgcaaatcatatcagcttataatcactcacttggtctatttacaaacatttaaccaaatgcgatcaaacaataattcatttcaatgattttcaaaactaattatggttgaagaaaatatgagcatacacttcatcaggctctcgcacatcaattaattgtgcctcgtccaaaaagctgggatcttgaattttcacatgcagctcatcaggttgaatgtcttgaagaattgattcttccctatcaggtaaaggagcaaatttactagccataagaacacatgttggaattaacaacaacaatcaccaaacattagctcactaggtggtgttggctaattgggtcaaaacaacaccattaggctctatcaaaagccaaaaattcaataacttttcattgaaattaaacaaattaaatcatccaattcataaacataagcctggaaatacctttcagatagaacctgcagcaggtgccatccaaatttagttttgcaccttacaactttgtttaaaggtgcagtaaaggcagcctcttcaaattcaggaacctatcacattttcaccatcagacatattttcaatcaatcacataattgtactgttgaagtaaaattagagagggggggaacagcacttctagttctgtaaccagatcactacctcatctgcttcctctacagaatcataccacaaaattatcgtcagttaagtgaaatgcaagaaaaagcataatatctaatttgtcccttctctcacctacccaaagaaagttcatagtaactgtatattttcctctaacagataaagacattacacaaggcagtgatgaataccatctgaaacaggcaaaaccgccttcaaaaagttgcaaagtcaagtaaagcctaaaacaaggtttaatctaatcttaaaagcataccatttgtccctttctgacccacccaagcatccctccttcttctttggatgggcacagtgaatattccgcagcaagatcactcaaatcttcacctgcacacacacaacagattcttagaatgataaacttgaaataaataaatatcttccgaaacctaaccccacacattggcaggagaaaaagaactgaattccctcggtgtcattaacctgaagagattctctgctgaagatacaacagaagcttctggtcatcttctttgaccaacaaatgctgcaccaatatctcccttggcctatcaccttcagcagcaccactagccccagtgccatacgaagctgaaaagacagaattttttaatgaaaaattacatctttttatgaaattctttttaccatcttacaaaaaaagtgatgatacataatctaatgctatcagaaacaaaattcccaagaagcattaaggggtttgcagagcaccactagccccagtgccatatgaagctggaaaaaaacatttttttaatgaaaaattgcatctttttatgaaaaattttgtttgccatcttacaataaagtgatgatacataatataatgcaatcagaaacaaaattcagaaacagaagcattaagggggtttgcacagaatgaggacctgttgctttgggaggcatgaagaccacaaagggtgaaagagggagtgaaagtgggtggaaacggaaggttcttgggaaagaggtgagagtgtgagtgttgtgagagagagaaagggagaataagaagattgagggatggaagcaaggttttggagttgccactcccactcttaactgacaaactgatctcaacattgaccttgctgctattgctatttgctatttgtctggcggaaacaatacacacattggtttcacatattcattatataaacacctcaagagtctaattatatggagagaaaaaattcacaaatgttaattattaatttattaatttttttatataagaatggattaaaaacatttttctcctttcttgaacccaattaacattatattttcacgtcaaatgctatggacatgtaaatagtcaaatgcttaatttgatatttttctctattttttatcactttgtattattaattatattaattattaatggattgtttaagttatgtttaataagatattttaattattttttaatttatttcactagctaaaaaatttgtttgaatgtttttggtaaacaaannnnnnnnnnnnnnnnnnnnnnnnnnnnnnnnnnnnnnnnnnnnnnnnnnnnnnnnnnnnnnnnnnnnnnnnnnnnnnnnnnnnnnnnnnnnnnnnnnnnnnnnnnnnnnnnnnnnnnnnnnnnnnnnnnnnnnnnnnnnnnnnnnnnnnnnnnnnnnnnnnnnnnnnnnnnnnnnnnnnnnnnnnnnnnnnnnnnnnnnnnnnnnnnnnnnnnnnnnnnnnnnnnnnnnnnnnnnnnnnnnnnnnnnnnnnnnnnnnnnnnnnnnnnnnnnnnnnnnnnnnnnnnnnnnnnnnnnnnnnnnnnnnnnnnnnnnnnnnnnnnnnnnnnnnnnnnnnnnnnnnnnnnnnnnnnnnnnnnnnnnnnnnnnnnnnnnnnnnnnnnnnnnnnnnnnnnnnnnnnnnnnnnnnnnnnnnnnnnnnnnnnnnnnnnnnnnnnnnnnnnnnnnnnnnnnnnnnnnnnnnnnnnnnnnnnnnnnnnnnnnnnnnnnnnnnnnnnnnnnnnnnnnnnnnnnnnnnnnnnnnnnnnnnnnnnnnnnnnnnnnnnnnnnnnnnnnnnnnnnnnnnnnnnnnnnnnnnnnnnnnnnnnnnnnnnnnnnnnnnnnnnnnnnnnnnnnnnnnnnnnnnnnnnnnnnnnnnnnnnnnnnnnnnnnnnnnnnnnnnnnnnnnnnnnnnnnnnnnnnnnnnnnnnnnnnnnnnnnnnnnnnnnnnnnnnnnnnnnnnnnnnnnnnnnnnnnnnnnnnnnnnnnnnnnnnnnnnnnnnnnnnnnnnnnnnccggttattcctcaaaaaaaaaaaaaaattctactagtactacttagaattttggcaaaagaaaaaaaagatcacaaacttggcagtgctttttaccaatttgtatatactcaatcacttatttacttagtggtcaacaacatgttgcatccaaatggtccaatatcatttcctaagtcaacaaaatgacttttattctgtatttacttttttccttagctgacacaaaaattgaacttgggacctgttctatctatagtctagtctctttcttacttgagcttagctcataaaaatgcttaccaacaactattgcaacttacaagaacaacctattcctttctccttcttatagccatctcctaaaagtgaacctgaattagttccttgtggtgttgtactatctgcaatgacatgtcaactcattccagcctctctaggtgaaagttgagaaggaagcacccgaggaaccatttgaaggggtccaagcataaatgagtaagcccaaaatgaggataatggcccctgccataaagcctgttggaagagaggaggcaacaccaaggtatggcaatggcatggtgaacacgtagatggatattgggactgccacaaagccaaattgcattagttgggtatgtctcataatttttcaaaattgagtgactaaaataaataaatttaaatttaagggaccaaaaccaactgtgacctaaatttaaggaaccaaaaatatatttaagcatatttcatcataacttccctcccttgttttcacaaattttagagctaagatgtccatataaacgagaaattattatacggttccaaactagaacgtttccatggttctgatcaatcttcacgtaatatgtacccgaattttattaactttctagaatatgaccactaacatgtgttggtcgagtaacatacagtaatttcaccaatataaacttcaatatagttatgcttggtgaaaaaattagcatacctgaaaatgtggaagcaagacaagatacaacagctgaagagatcttgaggagatgaagcaatgcaatattgaaacctatgtttacaataataaacagcagaggaagcagaggggcaccatcacatcctggaacaataaatcagtttctgtcatttcaattaccattagaataagaatagaaaatgagaattttaagtcaactcatcaaacagataattgcaattcttctagaaattttacatgcaggtaatcttgccttgtgacatgactatgtaagagacagatgatctaggtaatcttgccagtatggtaacgtgcttaaaattggaagtgaaatatttaggaatgacttttcatacaattttttcatagctcattcctgaaattttcactctcatttttaagtggacaccaaccttaccactataagatatgacaatatgaaaaggaaatatagcttaccacttgataatgtaccaacatttaggaagcaggctgcaccatctttaaggtagtttggtagttgactgaagggaatgccccataattttgacaagaaggggagaagaaggcacacgaatagggcctacattaagcatatattcttgcatttagacctttatttgcatttatatagtaaacacttcattgtaatccaaaagatgaacatttcattgaagattgcaggctacctacttggaaagcagatccgtacgaattgacaacaaaaaggtccatacaacagcctccctatttcagataatattgaatattgattagtatattcatgtcaggaaaagaaatgtcaggtttaaataggactagtttagcaacatgcagctgaaaattgtggtttggaagctttagagtctcgcacaatagaataatgcaaagtttaggttgggtattaaaatgagtccatcatgtatcactaaagtgaaagttttacatatactacaatttagtaatgttgttctctgcattatagtttgaggcgcatgtgcttgtgagtgccaaagtagtgttattgcataattcaggttgtcaaatggcccaataagatcattcaaagccataattagcataaacatgaattaaaacaattcactattgtgcgaaccttcaattttcgggatgaatccaaaaagattatttcctgcaaagtatgaaaaggacagtgtaaactatagagaaatagtttgaaggttgggaaaatgcaacaaacattataaaccatgataaccttcagcacggtatcagccgcttggaggaaaaatgaaactatcattaaaagactccaaaacataccaccttcctttaatgaattcccagcaccagctccactacaatagtaaacaaatgtataaataagaaggccatagaaagtaaccacaattttcatatagcttgtaccagacacatactttattcaacatgccttgggagaaaattctgtcagtccaagaattttgatgttgttgtgcagcatggaagatgtaattaacatttgaaagcattatgttagatttcaataacaaagtagttttttaccaacaagcaacaatttcttagacttctgagtttatagaacaaacctaatagtatcattaaatcaatttgtttggcaaccttaataataattgtgtcaagatgcttagactttcagagttagtttgttgacaacattgtttgtagaccatgttcattacttgtatcatggtatcatggttcaacaatgctccctttttgacactcataacctgagtcaccatggtctaagatccttaataaaattagatgtactactgaccttgctatagtaacaactacaccaatggttacaagaaagcatccaagtaattggttgactttatatcttctcccaagaaaaataattgacaggagtatttgccacactagaaaagtctgcaagaggatagctcaaattaattatctagctttattttacattttactaaacacctgcacaagttgtaaatatatgagctaaacacagattgtcatcctatagaacaatcaccagatgcaacagtaacaggaattaagaatatatgccagagagcaattgactgctgattggttttacctgagataaaattggaatcgatgctccagagagaattgctgatacaagaaagagcacaatagatgatcaaattcagaatgtgatcaatttcgtggagaaataaaattatacaactaaaagataatatatattcttagcatctccagctatagcagtccaagtatttatgctgtacattgtgaacactggaagtataagcattgtagagactgtaacaatttattacaaataatgggatattaaataagagcattttagtcaacatatagcaatattttacatctatgaaatattctttaatcagttgcacagttgcagtctgagtatacacattccactctaaatctaatgaacactagggaggcctttctgccaactatattctatgaagcaaactaacaccaataaatttccattaatggcctaatatagtctatatagtatgaatatcagtgcatcatcacaaaacaaaacaaacttgatgtactgatggaagaaattagaatgagttgaaaatgtgattcaaagggtgcaaagttacctcctgcggccattccagtggcagcagcaagagcctccaatagaccaacaactataaatggagcctttggagcatctaacatctcatccgtaacaatgcccgcatggtgtcgaatatacaaaatcgcaaagtacactattacatatctgaaatcaaataagcaacatcaatcaattttgtgcttaattgtttggttatgcatgtttcaaaatcaattctctttcttgctgcctactttttgatattgagattaatttatatatacatttatattaagttgtgtaacagttcaaaattaattctgtcaaaattaatttttttaaacattaaaataaatggcctcacaatcacccaaaccaacatttgaccacaaaatcggaaaaaaaactcaaataatacattttaaataaataattaccaatttggggatgtttgcaaactatttactaatatgggacagtcaaacacgcctaaattaggcgtgacacctcctgaatcacgctcaaattggacgtgtctccccattgcgacacgtgtccgttgcaacacgtgtcatgcattcatgcatcggtggtgatattatacgtataaacttcaaatggtcataacttttgatagaaatgtctgatggaagcgtatgatatgtcaaaacgctcgaaattcagagaggaagtcctaagcaaagttccaaaggggatttggtcgaatattttttccaaaaaatgtctctaagtacatcaaaattaggatttaattttgaatcatacaaaaaattaattgttttctacttttttatttagttttaattttatgaagcattacttttcatgaaaataacttatgtttggatgcatcatacatatcgcaacggacacgtattacaatggggggagacccgcccaatttgggcgtgacttaggaggtgtcacgcccacattaggcgtgacccgtcacgcttaatttagacctgtttgactgacttatattgataattagtttaaaaacaatttcaaattgataattttttaataaaaaatattatttgattttttttcccccacaaaatcaccttaaaaaaaaggaaacaattcttggacacggaatgcccaaaagttatcacaaaaccatgtgatgattttaacgggtctaggtccacaagcataaggacaacccggcaaatttagcataaaaaataacaaaatgcacatttcaattattcaatataaattttaagttcctaaaaaaatacatttttagtttaagagatatacatttattataaaattaataaatttatcatatatatatatataataatttattattagattataataaaaaacacatttatacttatattgcatatattatttttccatacattttttatttttaacaatttaatacatgtcagatgtggtaattatttttaagtaaaataatattttgaactgaattgtaaccgtatactataaaaattatcctatattatacttttaaattacctataataaaagtaaatatatactataattatattatatgacagttgtccggatctaaataagagtacttaatttattgcaagtccatggcataatctttattctaacgaataaaaaataaaaagacagttagaaccttaacgtaattcagttaaattctactatctttgtcttttgtatttacccgaaagtggcaagttgagcaagaaagaaagggtactgcttcaacggaaccaaagccaacttatacagaacccggttcccaacacccagcaccaccgttgcaaccgccgccgccgccacttcaaccacccggttcctacttccgacaactgcatcgcttccgccatcttccgccaccctccgatcctccacggcgtaggagcaggggcccaccttctcctccctccctccgacgtcggatgtcacccacgcgccgccgcccacggtggtccccaccgcaaccaaccgcattggccgccggacggaataaccgtatcgaaccgcgcaaatcccggcgggccgatggaactgaaagtgaccggctggtgcggcggcggataaccgccggcataatgaagccatggtttgaatgaatttatttgtggaaaaacaattcacaaatcgatataatataattcagagatcacaaacacgaaactaagttttgagtcggagaaattgaggaatcaatagaagaacatcatttgttactaaggaatttgaagtttgtaatgtctgcgacaacactaccttgcctatgatttaattattgctacatcgcatcaatgtttctttatcttataatatcaaccacaaatactattttaatctacctatttctatattatatattcataaatattttcctttttcaaaaagatgtttccatttctgccaaaagtcgtagggtcttcttagatataaatataagtaaaaagtatctttgagaatttttttattgaaaatataatattttttctgtaaaaaaattcttaaaaacatttataatcttgtatccaaataaattcataattaacttcaacacttatctagtggaggagaaagtgcaaagatctttgcaatcatacctttcattttttaaaactgtttcgtgagtatttgtgttcttgagaattttatattcaaaatttgacagtggtattaataccatattctttttggtaatggtttgttttgttgttttcagttgccacacgggcaattatttattgttatgcaccgtttgattgtgtgttcaaagattatgccgatgaaaagggattccaatttcaaattgacttcttcactggtggaaatgcaatgaactctactcaaagaaagatcgtcttgttgaatgataccaaagggatggttatcgtcaactgccacgttgcaaacagttactatcatatctcttaattatgcattccttctttcttatcattattaatatactatagaaaagagagttattccatgttttttatatctggaaaattaggttatttttatattagtatctaaaaattcattttttttatcaaataatgatctggaaaaaaaatttaatttagtatttattgttaatctcattctattaaataataatgtgataaatgaaatatcatgtcataaaatttaattactaacacgttattaaagatgatggtatggtaataatgtatcaattattaaatttgataatatgatactacgtgttatcatttatcgagataagactgatcataagtattaagttcaaacataaaaaaattcaattagttgtttgaaaaaaaaattaagtaataatattaaaatgatctatttttttaatatgaaaaactgatttaaatcctacttttattttaaaacatatcgcaccgcgtgcgcaggaaaattctccgatgaagggagatcttttgtgcatcagaaaaagctttctgtgcactttttcagaaaaaaagaaaaaagctttctgtgaagggattttttctaacaaataaaggaataccgatacgagatactttacttaagaaaaaatatttatattttgacaaactatatttatattgtagtaattaatttatcattttttcacacatcaaagagagattaaaaatgtgaaataaaagaattaacgtgaccaaaaaagatatgaaaaatataaaaagtattaaataatataaagtttatattttattcaccaaaacataaagaaagcttttgacgatacatctccagggaaggatttacatgtaataataagaaaactacatttaagtatttaacaattgtcaacatttatagattccatgataataaataaatcatatgaattgtacattagatgtaattcaaaattttaaaacattaaattttttgagttcttctcacttacgtgttattcaatatattcattttaaaattttagatagagtttaattacgagacaagtaaattaagttgtcaatttccctattaaggcatctaagtttcatgttagcaatcatgtctttaagcatatttccaattgtatctttgatgttattttgaatgaaatgcaataagtatatttctttannnnnnnnnnnnnnnnnnnnnnnnnnnnnnnnnnnnnnnnnnnnnnnnnnnnnnnnnnnnnnnnnnnnnnnnnnnnnnnnnnnnnnnnnnnnnnnnnnnnnnnnnnnnnnnnnnnnnnnnnnnnnnnnnnnnnnnnnnnnnnnnnnnnnnnnnnnnnnnnnnnnnnnnnnnnnnnnnnnnnnnnnnnnnnnnnnnnnnnnnnnnnnnnnnnnnnnnnnnnnnnnnnnnnnnnnnnnnnnnnnnnnnnnnnnnnnnnnnnnnnnnnnnnnnnnnnnnnnnnnnnnnnnnnnnnnnnnnnnnnnnnnnnnnnnnnnnnnnnnnnnnnnnnnnnnnnnnnnnnnnnnnnnnnnnnnnnnnnnnnnnnnnnnnnnnnnnnnnnnnnnnnnnnnnnnnnnnnnnnnnnnnnnnnnnnnnnnnnnnnnnnnnnnnnnnnnnnnnnnnnnnnnnnnnnnnnnnnnnnnnnnnnnnnnnnnnnnnnnnnnnnnnnnnnnnnnnnnnnnnnnnnnnnnnnnnnnnnnnnnnnnnnnnnnnnnnnnnnnnnnnnnnnnnnnnnnnnnnnnnnnnnnnnnnnnnnnnnnnnnnnnnnnnnnnnnnnnnnnnnnnnnnnnnnnnnnnnnnnnnnnnnnnnnnnnnnnnnnnnnnnnnnnnnnnnnnnnnnnnnnnnnnnnnnnnnnnnnnnnnnnnnnnnnnnnnnnnnnnnnnnnnnnnnnnnnnnnnnnnnnnnnnnnnnnnnnnnnnnnnnnnnnnnnnnnnnnnnnnnnnnnnnnnnnnnnnnnnnnnnnnnnnnnnnnagcctttttttgtcgttacatttttacctttattttcatggaaataatgcacaatacatacagacagtctcttgcttgtaacatgtgaagaccagtaacatatattggaagcaagtcaaacagaacaacaatcacaattcacacaagataaagggaatttattgtgtaaaaagaaaaagaatgaccttaagtaaggattacaatcatttaagttctaacaggaaatctaacaacaacaatcacaatactttttcagatcaaatactgaactactagttctatgggaatgggcttagatggttaggaaaaagaaatgggctagcattagcataatgttacctgtcgatgaccatcccaaacactataactaaaagcgaattacaagggatgtcacaagtagagcaggtgcaacaagtcataatgtaaatgtttggttcaacttgttttaatattatgttatattgtgtaataacttttcaaaaaggaattatttcctcaaaattaagttaaactaacttgcaagttgcaatacgaagacaaaaaagacataaattactaaatccatagatcagattatcagaaacgttgttgctgattataatgacataggtctcttgcatcacaatcacttttctttggaccgtttcagaatcaccaacgcgaaaagaaataaagtcacgaaccttcatacttcacagttcacacttgacacataaaaggaaggttaaaacagacaaagataaatttaagaaaatatacaataagcttatgtggctcacacgcatcaattggacaagagaaccgggccgagcagtttaaaaaccccccttcactaagcaatgaaggggcacatggaatttaaggtttacccttccccctcttgaacaagagaacatccatgacacgttgacaacctcaagctgcaacactatacatcaattataatctcagtcattttctggttcaatccaaatctttgggctggtaggagaatacaatatataacatgatacaaaaaatgttttgcccctcaagccttgtaatgaaaaatacaacccaaaacacttgaatctattgcaagaaatttactagcacaaaagtggacaacccagcaatttaagttgaagaaatggaagtctgcataacaaaggcagatgaaaaagaagtgacctctgcaagctgaagaagacaaggaagcacacataaaattcacttgccaatccttcacttaaaaacaagatggcagcgcaggcccgtgacaaacaaaagccaatacaacataaactatcacaagtaggacaactataagtgcaatcctgcaacatgcaaccatttagtcagtaagaccaaaaaaaagagcataactatagctaaagattgattaatagtattatgaagttgtatgaaggaaacaagtttgttgcctactattttgaaataattctaaaaataaaactagtagagataattcaaattttacttaattgaactctcaccacacatgcttacatttattaatactaatgacatgtgtacaattgcttttgataaaattaattttgaaccattgagcatgattagaatatgtccaaatttatgaccatagagttattttgggacacgtgtttttttgttagaaagtgcaggacatgattttccaacaccaaagcagaggctagatctaagtttgaaactgtctcatttatttctccattactcaggtatgggtgtgttccagttcactggatcagtttctatacattgaagttgaagggtttggtaataagaaggaaaataaaaatgttgtggcaatgcactgtttatgggaatttgtggtttggtaagaatgcccacatcttcaagggtgttcctcacctcaacaagactgcacaactctcctacattgactagtttttaggagcattcattttttctctgttttttctcttcttttgtctttgccaaggatttcttatcccccaacctttttcacttctacctcttctactcttccattctctgatcatttttcttcttttataattataagaaaaaaattaacaatggaattatttctatcaagaaaaatgttttggcaccttgggaagtttctaccaacacttcaagttccaaaccagaacctctaccttaatccccacacatccaaccacctatgtttaagcccagctggtttccatcagaatcctatcaaatatctaaaattttactctagatgatttttaggatattgacacatattccatttatgaacatccagttgataatgcaagaaataatataaaaaggatggagaaaaggtttcagattcattctagagaccgcattttttttccttataagttcaactaataagactgaggtttagatcaagaacatacgtaagcttgacatttctccaccagacagtgcttctgaaacgacgagcttgtttcctgaagcgaaatgtgtttccttgcatattagcagttttatccaccagcaattccaaccgatcacctctatctaaaactttgtcaatattttctatcatgacattccgtacctgttaaagaacccaaaagaaaagagaacacacatgagatcagaaaaacgaagtgaatcaaataaacataaggcccaattcggataaacttcttaacaaacacttatgaaagaagaaaataaagaggtaaaataaatcaagcttctctcacaagtcacaagttaaaatgaacttatagtctgatacagcttaacttttaaaagctctcttataataacttctctaaaagctaaagtgcatgactagattttaacttacaggagaagtttgatttatattatttctctatttcttctagtataagtgtttatatagaagcctatccaaacaagacctaagtataaaatgtaaaattcaaagtgtatatcaaatagaaatgcttctcattagtcattattagatgtatttgtcccgttaatcacaaatttaatgtctgtattacatttctaaggaacaattatcttgttcattggacttacgcagtgtttgaatagctgaaaaaggaagaaaagaactgaagttgaattaaatgcaattctactagttattaacttattaattcttaccatagctaggaatctaggattgttcaaccacacactcaccagcacaattagttctcaattttcaattactgcataaaatcgaagagagagagaaaaaaaacgatacgatacctgagacatttcacctttgagacgattgatcctatcagcgttaggatcactggagtaatactccatttgctgactcaaaaccctagagaactcctcgttcattccgtaaggctgagcggagtgaacggcgcgtccgtaagtccgcacgaacttctgatgtatgtcctcgagaaacgcaaaaggaattctccctacagaaaaaaaaaaaacaaattcaaaatgttaaaaacgaataaattagggatttaggtttagaattgaacggatcgggaaaacgcactgccggcggtatcgtcggccatgcagagaacggtgagtccatcggtgcgtttgacgtggaagatgtagcgatcctgagagtaagaaacgtgcatgtcgttgttgccggggattttctcgagaatttgacgcgcgattgcgctggcgttggtggtggtgccgctgaactccgccagcaccaccgatccgcgacctaccagcgcgtatagaatccccattcggtttcggatcggagattaattgaaggaaggaacgatccacttcgacacacacaaaacccttttcttcttcttctttctcttgtgttcatccactgtcactttcttattgactttttcctctttcaaccactcgctaccttctgctttatgattggaatttaattattgactttggattttaccgcctttctaaaaaccaaaaaatgttcccccgcaattacaatttactattcaaaattgttaatttaacgttatgacaattataaagagttatcccatttactttttattacaagttcagtgtgtgttttgtaatttcttgtgtggattcaccgattcacatctggtttatatagtaggccaaagtcaccaaactgatctactttttttatattgcctttaatttacttccttttttttttatcaatattacaatgacataaaataccattcaatacatagataaattgatactggatcgttctattttaaataatattagtctcgagtttaaatcattaatataattaatttttaattcataattatatctttaacacagtgattgattgatagaggtattaattcttattcgtattcaaatataattaattttaattttttatataaatagtgattgtcatgcacaatttaagctaacaagttaaatatatatttaaaagttaatatgtatttttaaaacggaaatgttaacttttttgttaatttaattatggaaacaactgttacttttatttattttcttaacatactcccacttgatccctcccccaaacccctcacactatatgataagagtatccaaagacccctcccttcgtccttgtactccccatcgccctcttctccatcatcactcttctatctgtgtaatgtgtagtggtattagaaattgatgtatccaattaaagtattctctcttctgttgtgttctcatcaatatcacaccactcatctccacctacaacctagagtctagagaacatccctctaaatttctcatcttcagagcattgttacaacttacaatgttcactgatcaaaacaatatattcaatgtgatcataccttgcaaagggaaacaagatccttatcttattttttcctatgctgcatttgctgtcatgtaccgccagttttcaggactaagtcgtttgctcccatattcttttcgtggattaataacacttatgtttttggtttgtcattttgggtgggattttcattttttgtgtcatcaaatttggttatattttgcaatctcaatgaagttcctcctcccatgccatccaagaagtgaggatcttgtaccccaggaccaacaacaagatcaagacagagaatgcggtaatgctccaaacaaactgatgtaggcagtggtggatccacattaatgtgttggttgtaatttatttccttatttttttttaaattacatataaatatattgagtgtgtaggttgtaaccctccacttttgtgtatttgatcctctgttcataatttttttacctattttataatatatattaattattaatttttttaaaataaattgcccctaactaagatcctagatctaccactagatgtaagcattaaggatgttttataaagttatttggagcattgcatttcatggtctgtttatttaagcactatgactgttagtgaaaatttaccctttgcttatacttggtggaacttttttttcgaaataattattaatgataattttagaattggtattctgtatttgtttctgaattttagtggaacctaattaatcttagtagtatttcttcccccttttgctgaaaaaaaaataaagatggtaaagagataattgttttcattctaagggctccagaatgataaagcttgataattccaacgattaaaattaaaatctccaaacaactcattttgtgaatatttataaatacaattttgataacatttttttcacacaataattctacatctcatcattttacacttattgttctcttaattttttttgtgtgtttccttccgttttcacatagatgaatccttattaatagaaatattaatcttttttttttcttgcaaaaatttgtaatgttcgaaacttcgaataatgtctttaaatttttcagtaacttaaacatggagaccaactagattccggagcaatacggtgtgaagacttttcattcggggccaaaaaagtgaaaaatcaacaatcacaaatgaaacttggtggtggattcaaatcactttagagtaactttaatggaggatttaaggggagatctttgattgaagatctttctttttttaaatccatcattaaagagagaatgcagattttcacatggagatttggttctttctcaataacttttaagatctgcacggagttcaaaaaaataattttttatgtgattgatgaaaaaaaattaaaagttaaaattaattacttaaaattaattatatattttattaatattcatatattttttcatgctttattaatttatattaattacttaattaatttaattaaatttaaaatatttaaaaatgagatacatgtgagacccattaaaattatctaagatcttaatttgggatctacaaatnnnnnnnnnnnnnnnnnnnnnnnnnnnnnnnnnnnnnnnnnnnnnnnnnnnnnnnnnnnnnnnnnnnnnnnnnnnnnnnnnnnnnnnnnnnnnnnnnnnnnnnnnnnnnnnnnnnnnnnnnnnnnnnnnnnnnnnnnnnnnnnnnnnnnnnnnnnnnnnnnnnnnnnnnnnnnnnnnnnnnnnnnnnnnnnnnnnnnnnnnnnnnnnnnnnnnnnnnnnnnnnnnnnnnnnnnnnnnnnnnnnnnnnnnnnnnnnnnnnnnnnnnnnnnnnnnnnnnnnnnnnnnnnnnnnnnnnnnnnnnnnnnnnnnnnnnnnnnnnnnnnnnnnnnnnnnnnnnnnnnnnnnnnnnnnnnnnnnnnnnnnnnnnnnnnnnnnnnnnnnnnnnnnnnnnnnnnnnnnnnnnnnnnnnnnnnnnnnnnnnnnnnnnnnnnnnnnnnnnnnnnnnnnnnnnnnnnnnnnnnnnnnnnnnnnnnnnnnnnnnnnnnnnnnnnnnnnnnnnnnnnnnnnnnnnnnnnnnnnnnnnnnnnnnnnnnnnnnnnnnnnnnnnnnnnnnnnnnnnnnnnnnnnnnnnnnnnnnnnnnnnnnnnnnnnnnnnnnnnnnnnnnnnnnnnnnnnnnnnnnnnnnnnnnnnnnnnnnnnnnnnnnnnnnnnnnnnnnnnnnnnnnnnnnnnnnnnnnnnnnnnnnnnnnnnnnnnnnnnnnnnnnnnnnnnnnnnnnnnnnnnnnnnnnnnnnnnnnnnnnnnnnnnnnnnnnnnnnnnnnnnnnnnnnnnnnnnnnnnnnnnnnnnnnnnnnnnnnnnnnnnnnnnnnnnnnnnnnnnnnnnnnnnnnnnnnnnnnnnnnnnnnnnnnnnnnnnnnnnnnnnnnnnnnnnnnnnnnnnnnnnnnnnnnnnnnnnnnnnnnnnnnnnnnnnnnnnnnnnnnnnnnnnnnnnnnnnnnnnnnnnnnnnnnnnnnnnnnnnnnnnnnnnnnnnnnnnnnnnnnnnnnnnnnnnnnnnnnnnnnnnnnnnnnnnnnnnnnnnnnnnnnnnnnnnnnnnnnnnnnnnnnnnnnnnnnnnnnnnnnnnnnnnnnnnnnnnnnnnnnnnnnnnnnnnnnnnnnnnnnnnnnnnnnnnnnnnnnnnnnnnnnnnnnnnnnnnnnnnnnnnnnnnnnnnnnnnnnnnnnnnnnnnnnnnnnnnnnnnnnnnnnnnnnnnnnnnnnnnnnnnnnnnnnnnnnnnnnnnnnnnnnnnnnnnnnnnnnnnnnnnnnnnnnnnnnnnnnnnnnnnngaaataatttacatattttaaaatttaaacgtattactctcttatctccaaatatgttatggttatttaattactggaaatactaagaagtagctagacaaatatgatacttgtatgaaagtttaaatttagtaggtactataggttttaagtttgtttatgtcaataaagagagaaaaaaaatcaactttataaatttattgggcttaagtagaaatattaacccctcttcccccaagaaaactaaaactcaaatatagttgagtttggatccagtggattcaaaattataggagtaagagacaaaatataaaaacttataaggcttgcttgtgaattttggtgaagtgcgaggcacgaaagctacttctcaaataatcatattcccactctttcttcagtatctactagctttaaatccctcatcaatctgtctaatgctatatcttccattcatcaacagattctggagcaaaaaacactgtgattcctattcataaaatgaatatgattgaatcttgctatggcccttaattgaagtacgtacatgtctgtggcatttttacctaagggcatctttcacaacatgacattttgtatcaaaaaatccatgcatgaatgcagaatatgaatacaataccatgcggacataaggataatataaatagtacttcgtaggacacgatatggatacagctatagcacatcataaaaaaattgtataaaattagcataaaaatataaagaactcatgttttaaaagacactgtgatgggttattgtgaacatttattagacgttgtaatttatttattctgatgtgtatgttgtaatttatttagttaccatggtattcttcccatctatattttgaaatgttcctgattaattaaaatttatttgtatatatatatatatatnnnnnnnnnnaatactacatagcatttcataatgtgaagatcaaacttaaataagaatgtttcttttgttttgtgagtaatgattttgataagggtaggaccaggggaggaagaaacaaaaatatctaccatcttctcttcggtttacgtgaaaacgatatatagcttctttcataaatacacaaatatataagactaccatgatggttccaagtaatcatggtgacaagcagctgaaagtatccaatgaatgctaaaatagcaaaccataatgaatctgtgaatcatcaagtttatttggcagatagtcattgcaatatgcaagtatacaacaatgtagtaccaaagaaggactacgtgaccttttgacttttcagaactagtaattcataattgaaattaacaatattgttcttctcctcatccttgcgatttttcagactgaacgttgctgcctcaaccacccttgtgagaaagatttctttcaatatgggtcacatgtggcgtgagttttaagtggcattattgtttattggacaatggccgtctaaggaatcaaagtttttggatataatctgtttagataacatcagaaaaacatgatgaccatgtcttcttaaaacactttttttagtaatcctcttaaaaataattaattttcttggtataaagtgataaaattattaaaaagaataatcacgtcatatagaattatgaattgcaggcctgtttatgcttgttttgcacttaaaacgcgtattggatctttctatgtttatttcctttctaataatgtttttatgctaaagtatggggaccattcatttcgagtggggacatgatcagtggcggagcataagattggtgggggtggcaattctttcccccctcaaaaataaaattttaagttttgtcatcactatttatggtaattccaaaaacaaacatgccatttagaaaaaagttttacatttctcagtaatcatgataatccaaaaacttaagtcattacaatttataattaatattaaaatggaaactctgagaggagaaagagcaagttaattagaggaaaccaatttgcatggctaggtacttgacaacgtacacaattaatgaggactcgattggtattaggtatatttatacttaattaatactaagtcaggaaataaaaaaatgataatcaatctgaaaattggataagaaagatagaaatcaacaagtttttgaaaagaattttaaaataaaatacaaatttgatttaaggacaaaagtgtccagggaatgacaggcacatatatctctttcagttgggcaaaggcaaaactattactgtgcttcttgtatgcacaaggtatcaagttctagcaccaatcaataatatttctgaaaagatatttagtttagatagcatttcttccatttcaaaataactaatgtttaagtctttgaaaaaaattcaaattgattgatgttattattttttaatgaaatatgtaaatatctatttctgtcatgtaataaataatgttattttagaagatccaataaaatatttattgaaattaagagaaaaaataatgatattttaataaaattatctcctaataaatattaattttcttgaaacacttattttattggtttgtgtaaaaaaatattaaacattagtcattttaaaatagaaggagtataatataatagaaagagatagaaaaaaataaatgttaatgggatatttataaataactcctcttatatttttttaaagatgttttataaggctattcctctagtattgttctatccttgggtacaaaaagtactagtggggtgtgtaccacctgacagatccctctatgtgtgtatttttaacatatgttccttctcatgttaacttttttttttttttctttctttttgctctgtttagccattttagcctctccctaatttatgccatggttttgacattgcgcgttcctacccactttgactcgtagcccgatgctaagttggggcaaacaattcagtcagcataattttttttggttaattaagtttataattcttaactttttcatattataatttatgatctcttaaaatattttaataatttttagtcattcggttaatttttcatcataacttttagtttctctctttttttttttcatttttaatttctaatgtttttattgctcaagagtaatttcaaatataaaataaataaaagactaaaaattgacaataaaaattaattatgaacaataaaaataaacaaaagattaaaaatatgcaaaaaaattaaaaatactaaaattactaacacaaaataaataaaggattaaaagttatataaaaattctaaaggactaaaaattgaaatttataaaagttgagagactttaaaaatttaatttaactattttttattcaaaaatattaattattagaatgttaattttttgttaataaaagaagattaaactcatgatcttttcctcttttctttttccttcaatcattctacccatcttatatatcaaattcactaaacataataaatggaataaccatttgattctattttttctttagtacaagtacaagaatgtgttactaaattatgccttaagttcattgcaacattgaaatataaacttatttataatctggtttgcttgtattggcagtgaattttgagtttggaccaccgtgagacatgatggtatgagaatgtgatgggttgggtggtgacacgataaaaggtacccaaaagacaaagcctagcaagtctaacctcattcattcatcgtttccttgttctaaccgaaccagacaaattgtccagagcagcaattccaccggctaccttcacaaccggtcaccccctcaacaactctgtcccatgttcttattttctaccaccgcacgaggcaatgccaagtgcgaaatgagacaaacaaagaccaatgaaatgctcttatcacaattgcacactctttattatttttagtattataataactataaacactatattatatatatgtatgtatatgcgatgggtttgttgcagtgtaagctaagcttcaatgaccattttaactttgacatctactttcataatgaaaagaccagaaaaatacaaaataaagaatggtagatggctctaatacaaagccataaccatgactatgtgctgtttctgtttcatcccttttttcctttttctaaaaaacaatgtgttactggcatgttgattaaaaaaagaaggaaaaaagagtatccacttggactgttcaaaattatttctataaataagtagttgaaataagataataaattgttcatcatcctctgggcattctcacacttttcgagtgtgaattaataaccccctttgatttttgaaatactaaatcaattttggtactattaatatttttttttctttaaaaaaaatagagacatcacgtgcaaacattttatctttgctttgaacagatttctttttgtattttaactttaatgtgactctaaaatttaaattgcttgatgctgttaatcatgatactacagtatatttgaacctcatacattaattagtgccttaatttgtttagttgcacaaataatacttattttgaacttcctaattttacaacaaaagaattactccttttataagttagaatcaaaacatccctttgttgcattaattgatcataaacaagaacatatattgcattacccaagttcaaatccatttcatcataaaccagattttctccttttaaacaaaactaataaaaaaatagaaaagcatgcgatacagcatgttctaggtgtctcatcatagagctttgcggctcatgtgcagaacagaagaggcaatcacggaataacaggaagttgtttcctacattatcttaaactatttttccactgcaactcttcggattcgtaaaattaaaatcatttttgtcctaatcaatgaaattgacactaattttaaactcaaaactaaaataatttaaccaaattattagatacaaagtgtttaatacacctaagttaaagttaatttaatgaaaaaattattaatcaacctttatttatctttcagtcaagttttagaataataatttttaaaaaaatattataaaagttgataaacttattatataattgttagtttgagcagaatagagaatttgaatttcttaaacaatatagattgagctttacgtatgaaaataaataaaattattagaagagaatatctcagtatatattcttcagtttttgttgaataaaaagtgacaaaatggagaaatactccctcaatatcacgatgtaggacaccaatgaaatcgtgcagccttaaacagtaattttacgcaaactcggttttcatttgattccttgattcataggggtactaaatgatctgtggaaagaggttactcatcaaacaagattttttagtaagatcagaatttcacctaaaaaaatgattgtctatacctagattgcataaattatttattcaaactaaaaatgtaaactatttttttttttctaaaactttatttgatgtgatcgatatctgaagattttaaatttttataaggtagtacataaaaaatttaaggaggtgaatgaatttgaattagaatcatcaccatcccaaaccaaaatcctaccatccatctgagaccattatttatgtgtttaggtaacattcataatttacaggcactaactctggtatgttgctgacgtggcacattttcattggacagttacctgacaagacttaaacttgactatatcggacacaatgcccttaccttccctccccctctttctctctctacccttcattctctctctacctccacactctcagaagacaccagaagtaggtgaaaagcaaagaaccctttcttctcttgagatttttcacatcaccaccacaacacaacgactgttgcttgctcctcgcacctaatctgcctcaaaaagtgcgaaaaaatcgcaaagaaagtgacggaaaattgaaaccccagaagggcaaggtcttgcccttgttgtggcttatgtgaggatacaatcaagttgggatttttgaaccctaggtgctgaaagtttgaggtttttcagtcagatctcagcgattttggtgttgtggcttttggggttggaactcactcgtggatctctctgatgggttgactcaatagggaactgtgattggttttgtggggttttcaaatgttgaaaggttaattttttttttttttttttttgtggggtgatggggttttgtttgggtttgaagtgagtggcaatgctggttcttcagtgatactgtgtttgtgtggaaatgtctgctccttcagcggcttttgagcgaccgagacctggggcttctaatacggtacgttttgttttggaggggcagatattatgttgactttttttgttgaaaaaaatcgatttcgagttaatgcacattgtaatttaggttagtttaattgaaatttagtcattagattaattttcttttgaataaaattaatattttcggtgcatgttagtttagttaaagaattttttttttgcgtttataattatgtggcaatgaacgggatttatgtgggcaatgtgattgatggttgctggcatgttggaggctgagattagtacctcagttttcatctttatttgtttactcttttgttaaatttaataaggaattttaccgtttggactttggaggatgaaaatatataccgaacagattggcaggtgagtcaagtgaaaagaaaatatattgagcaatttaacccattaagtaaaacctattaagacacccgtttactgaactacattgccaaaatgtggaaaaactaggaaaaaaatatagggtagttgacaaatttgaagaatatatactgttcttaaataattataatcttgatatctactattcctaaatatgatgctattagtatttaccaaaggatcaacttggattcggagtgggtgggggctgtcatgcattttggttacacttgtttcatttcaattaggtttagtctggagctaccctgtggttcctaacagatgttactatttggcaggtttttaaaagtggcccacttttcatatcttcaaaaggttggtgtctgaatctctgtctcccctgatcgtttatttcttgttgtttattttcatattctcttgaaaggagttttttgtttgtttattttggtagcttcttgtaacgactaaagaatcactgaaagaaaactgtttaaacttgcagaactttgagggtctgcacctcccactgcccaattggcccctatcctcttacaaaatgacaagatatccctccctcaaaacaccccttcttatttataggaaaaatgccttaaccaaactatcttaaataactaactcactaaaataactaagagaaaaaagactatgcactgataatgtaagaggatgacagttttactctgtcatccaatcacaacccaccctttatggtaagtttgttaacttttacaataaatctacctaagaagtcgtatcaacgatgatttgtaattgtatgatagtgtaaaactattttgcaccatcagtgcatgaccattaagctctataactaatagataggcaactactgacctattgtaactatctactaatggggagtacctaacatttctgttctctgtggatggtatttattatattcaaattaatcaatgatataggaatttatcaatgttatcccattttgatcttctgtaggaataggctggaagtcttggaagaagcggtggtttatactcacacgcacgtcattggtctttttcaaaaatgatcctgttagtatctctcaaatctttctcattcttgctatgatctttatttgatatctttttgtgttctgttgttctgtgtgattcaattctcaattaagcagatatggttacagatcatgattttgataacaaaaattaatatagtgattgatttagctttcttgatatatgaactaattaacattttatggatatactatgtgctgatatgttttggaaaaatggcattttatttactttacagttcttattggagagtaatacgtgactgtagactaatagagaattgaataatactataaaagtcttagctattagtgctgatttattttactctaatgtattaactatcaagttacttttgttgttattatttataattgtctttactttgattggtcatgtagagtgcccttccacagagaggtggtgaagtaaacctgacattggggggtattgacttaaacaattcagggaggtatgttggataaattgattttttgtagttgtaaattttggtgtcaatctgtctaaaagttgtgaattttattttccagtgttgtagttagagaagacaaaaagcttcttacggtattatttccagatggacgtgatgggcgagcattcacccttaaggtgatgtgtttattatatttttaagtgaatgagaattaaattcaattgtactacttctaaatgtctttttaattgttgggccatataaattctgattgttttctcaaatatcaggctgagacatcagaagacctgcttgaatggaagacagctcttgaacaagccctcgcacaggcaccaagtgctgcccttgttatgggacacaatgggatttttcggagtgacgcaagtgattctattgaagggtctttccatcaatgtatgtgctcattattccttaaatcttattcattttatgtttactagcttatattagttataggtcaattctggtgttgctaggattctgtattttttattttaaatttcttaacattttatttataggtttttacggatttttgtcatccttctttttcaatagaaaaaatctgtcctcattttcactatattttgtgcggtgcttccagggagggacaaacgtccaattaagtctctggttgttggaagaccaattctgctggcactagaagatattgatggaggcccatctttccttgaaaaagctcttcggtttctagagaagtatggtaagttatgatcttctattatatatgtgatgcatctgcatttcatttcactttttctcctctcatgattcaaattttaggagttacttgttcagctttatttctctataggcagtttgttcaaaatttgttggctagtcggtctgtctggataagtgaaccctgtgcttaagttttccaatattttgttcaactggagatcatgttgcattgtatattttggtttttctttattggtcgtgttacgtattacgttaaaatgcaaattacctcttcaaccttgaccctttggagaatagcctgtgatttaaaatgttgtaaattaagctacttaatcgttaaatagcgacattggtgtgcaattattgaagcacattggacactaaagctcatctatcagcaaagcagatgattcctttgtttaataatttgagtgccttccatgtgatgttgatatggctttctgcaaaagcacctgactgcataatgacaaagaaaaatgttgaatgcacgacttctaccctatttttcagtgaagggcttctgctgattttactatttttaatttgcaggaactaaagttgaaggaatactgcgacagtctgcagatgtggaggaagtagataggagagttcaagaatatgaacaaggtacaaacagttatcttaaacgtcctagcactttacatgcatttgaagagagtaggttgttggtacttggtacagataacattagtgaagttaattgggcttcaagaaaaaaaaatagcaatgaagttcattggggaaacagcaaggagagaaaaaaacataggggaaaggaaatctaactttcataaatcctgatcatccaaaattacaaaaaggtgtttagagaggggtagaagagatttctaaccaagcatatctatgcaccttttcaagaactttatattgttctgaagtagttgttctttcttgccatccaatttatgttataaattatgctggctacttttagaatcagccactgtctatatggaaccgatgttatgaatatttttgtagttcaacccttctgttggtgaaagaccagtaaagataatatccagacgtagacactcagtttaatatatggatttattttttgatacatgaaacttatgaatgccttgttcttaattgatatttccaggcaagactgaatttggtcctgaggaggatgcccatgttgttggtgactgtgttaaggtatttatactagttttccatcattggttatttaatgaacataaatatttggggaaaaaaggaaactatatgttgaactctaatcatggagaagaaaatcctctatctaatatttgacatgcctacaaacactaggaagtaggaaatatggtagtatctaacctacacatcattcaacagtgggtacagagaattattgatctcaattttacgtaacgtaaagtaaggactacacaagaaatagtataagaaatcctccttaaacatagaagcaattgagcgcagaacaaaaacattaaatcaaaaactgacaatcacattaattattagtgtaaaagagctcaattgctctgcatgtctattgtctactaggtaaaaattctgaaagagactgagtgctgatctgggaagaaaggcataaaaatgagttaaattttgggaatatttctagtgccaaaccatcatgttcatgcaaccagtcttaaaaccaccgaccctacttgcatattagatatcagtcataatagctattaaagatcacactaacaagaattgctggaggaccatttataaagctgttgtatgcttctgaaagaaacattgcagcagcaattttttgttttacatatcattaccagcagtagcaaacccccttttattcaagtactcatcagtatcacctattagcttctagtctaaaagcctgtacaatctaaatgaaatctggtgtactttgtaaaatttattaatataagagcaccaggcttttttaatagtttttctgtgcttacaattaagaccttgaggccatgacctgtaatcaatcatgcattcttccatcagcatgcctgaattggagcagctattattttggtaaaatcaatctaattaatacggatcctggatttttaaaatgttttgttggattatgcattttatttaatgacaatccactgggtatatttacagcatgttctaagggagctgccctcttctccagttccagcttcatgctgcactgctttgttggaggcttatagtaagttgagctctatgtttaatttctttatgattatatgttctgaataggtggtttagttttgttcttttgaaatgctgctaattgctctatttattttgcttttttttccttctattttttttatggaatatgtttgacctttggaaaatataacaacttatcctttttcttttttttaaaaaagctgttaatgttgaaaatttgctgtgaaatattgaaatgtgtggacgagttcagctatgtttggcccaccttttttatgtggcttaaaagctactttaaatttgtgtttgatgtcagttactatcattgactgtcctatttaaatctcacctatttttttcccctcattttaactttatttgcttcttatcttggatgtgcaaatttgcttatgttgatatgtctaatgcttatgtactttccatcacaaattgtcagttgttgagttttgttgcttttatcttgttctctggatgtgaatatatgcttgagttaattgttactattttattttacaagaaattgatcgcaaggaagctaggattaatgcaatgcgctgtgctatattggagacttttccagagccaaatcgacgtttgttacagaggtgctctctctatctctctctctctctctctcttctccccgctgccttggcaatgacacacacacactattctttccatttgttgtatcttgttcttgtatttgagtttgctatggaataattatggtagaataattaaaaattgcacttgaagagaatgtatattgggttttcttgatttctgtttggtttcattttaagttagaacctttatgtttttggagttttgttcaggtttatgtggctttaagaaaaaagcctctaaaaactacaattcaatgaagttttcactatcttaccctaagatatttgtaacctatgataatatctggtgatatgatagaagattggtgtaacacccattgaggaaaagatgacaaaatcggttaaggtggtttgggcatgtacaaagaaggccacaagaagcgccaattagcagagtagattgcatgattttttagcccaagaaaaggagaagagggaaaccaaaatggacgttggaagaaatcatcaaaggagatctcagacttaataatatttctgaaactttggtttttaactgtgccgaatggcgttgtgtgatccatgtagccgacctcacctagtgagataaggctttattgttgttgataatatctggtgatgaggaataacctgttgcagttattattatgttgataagtagtaataataccttaaatttgtagcctgcttaatctgagaaatgcacttgtataatcttaaaatgacaaaaacaaatacccttaattttttcaccataatttaattgttatctctacctttgcagaattctgaagatgatgcatacaattggttctcattctcaggagaatagaatgactccatctgctgttgctgcttgcatggcacccttgctcttacggcctctgctagctggagaatgtgaactggaggatgaatttgatgccagtggtgatagttcggcccagcttcttgctgctgctaatgctgctaataatgctcaagcagttattacaactttgttagaggagtatgagaatatatttgatgtaagaaactctcaatcaatttgtattcttttgattatttgctttctggtttgtgtatgattacaattaggaaaattaacttctagttgctgcataaccttcatttatgttttgtttagcctgaggtatcctgattactcttgggctcacccttttttctgtccttgtatgggattcttttgcttgtaccgaagatgcaaacttactatgaagttttgctacgggacttgttcatcaagttaactgttgctataaatttcaatccgtagattgtataatgagctaaaaaggtttgacctcttgtagcatacattgttcctataatgcaactaaaattgaatgtcgattcatgtgactaatgatttacccatggtcagttggctgtgtttgctaaattttgcaattccaaaaatgtatgttttcattccttgattcaattctaccaccttagtttttatctgctgtttcaggaagaaaatatacagagatgttccatgtcagcagattctcaggttgaaaacagtgggagtgaagattctactgatgatgataatatagatgtgaaagaaaatggttaccatgatgcggagaatgaagttgatcaggagacagatgatgatgctgatcgtattcagagtggaaaattgagtgagagtagtggttatgctggcagtgatctttatgattacaaggttatctcctgcaatgttattttctctgttatagagatttatattgattaagctcttgccgtgagtagcaatgttattttcttttctctctatcctcttaaactcttctttgtgatcctgcaggcatttggaggtgatgattcagatgttggatcctccagtagtaaccatgctaagactgaaaatgctaatctgaatgctgtttcagataccccaccactgtctgaggatcaaaacaagcaaagaaagggcagtgaaaatccagttgatgagaatgatgcttcaaatttgttgccttcaactgaatcttatcgatccatgggtgagattttatcttctatggaccccggcaaccttttgcccatgccagtgattgaatcaggttctggaaagcaaacaagtaaagctagtagcgctagtttcagttctaagcggtcggcattctggggaaggagcaatgtgagttgttattttttgaccatttacagcctaacaactttgtaggatatctaaactcagtgtgaatatagaatgtgagttgttacaggaatcacaattacactaacaaccatttataggacaatcatacatttatgtgatactgagttactgacaatatatttgcaataagctgccattaaaatatgcagacttaatatgctagcagtggatatacttaaattatgtttgaggcaaaactgatgcagacttaatatgctagcagtggatatacttaaattatgttatgtgaggcaaaactgatattttctattgtagttttgaattttcaaggtaaatacatggcatctgataatttttttgatttaagcagccaaggaagacaccatcagtggaatccgttgattcttctggagaagaggagtaagatacttagctttgtactttttttctttgtataatgtgctcttggattgtgattcttgatagaattccaagttattcttcaatgtcttcttatagattttttggataggtggtgttaggttctctagcttggcttttttcatcagctgtaacagctatgttttgttatcttcttgcattacgtgatttgctttatacctgtcttccttttttcaaccttttttcttctttcaattttataccttgaaaacaaataactaatacttttgatgcctgtaggcttgctattcagagactagagattgcaaaaagtgatttgcaacacagaattgcaaaggaggtggatttcttatgcctacttatttttatgctgaatcatataacgaataattttttttaatggaattggtcttattttcattttaggctagaggcaatgcaattttacaagcaagcttagagagaaggaagcaagctttgcatgagcggcgcttggcacttgaacaagatgtacatattgatatatctccctccaatatgaattgtaactgtttaaatttaatttgctggtttgccctgtgctttgctgcttgtttttaatgtggcatgtgattgcattttctgcacattcttgggtttgacattcctgacatcatttttgctgttttttttctttaaattgatttcactcttaaatttaaattgattaaaatattcttgcagaaaccaaaaatggtttctaatgaattttccttgtgtattactacaacttatgcaagatgtggttgttaataatggaaccactttacattgatttatgatatggataaaatgcattctacactaatggaggtttatcaaaaaatataatttaaagtgttacttgctggaagggttttccatattggaaaaatgttttttcttttatattctgaatggcattttaaagctcttttgaatgtatacttctgctgactgaagctcaggattttataatcactagggccaaaaattgtgccatatctttcttttcgttcaatagtatgtgtcctgtttgatggttattgtttcttttgaaagtaaatatgtaaaagtcttttatccctcatattttctttattttcttttttaaattcaaatggatataaatcccctcattataattttgatcccataataagatgcaactgattttttaatctacaggtttcaagattgcaagaacagttgcaagctgagagggatcttagagctgcattggaagtaggcttgagcatgtcttcaggacagctttccagttcacgtggcatggattccaaggtgatttgatatttttgtaaattttaatattcgttttcccttttgatggctttctcagtacacattctgtaaaaaatctgctattgtacagacaaaggctgagctggaggagattgcacttgctgaagctgatgtggcccggttgaagcagaaggttgcagaactccatcatcaacttaatcagcaacgacagcatcactatggttcacttactgatgtgggtgatcgataccaacatgcccaaaatcatcctcaacagtgagtatgcagacctatgatatttgtaataataagaaagagaaggaatctacatatgaaaatttaagtattaactattacagcttttgatgtacttcaaaattcaaattggtgctagttccacatgaatttgacaccaaatccaatttaactagcaaagggtctactgacatattccaacttcaaatggataagtacccactaaagttgacacacaaaatattggagttagagaaattttcctaaaaaaaggagatgaaatgttgtaatatttccaattttctctttttccttgtatccataataaagggtggtttgtatgactgtatcctctgcatgtgtgtttgtactcattctatggtaatcattttaaagttttaacaataatttactttttccagactcaaacactagtttgttgctgcatttctttaaagtttatgggaccagtttttaattgaaagccatgtgaacttgttaactcctttagtagttatttaagtctttttgacttgtgcaggaggtttcttcagcaagattttgattcaacccttgcctttgttaatcacgagaggaaacaaaggactgaggtatgtcttatagtctatttctcaaaatcaaaactaaaaggaaaaacaatcaggaagatggttgaatcttccctatgttagtccaatcctttcaactccttctgttagtattaaataattacatgagttgatacattattacacacaagttagttccataattaacctctaatcgagaaacatgtcaagttcttttctttgcttttattgtaaaacttattctcatcatgaccatgaaaaatgatatagaatggtggcacaaatcaggaatttttattactggattcatttctttagggtattagaatctaaaatgcttctgatccaaaattgtcactggttgcagcacgttcctctctaatttagggatctatcattttttatttgtttttttttatgataaaattagttcattaattatagatgatatcttcttttatggtttggactttggagcctcttcaacaaggtcggtaaaatttgccttttcatatatgcaggagagtttgttgggcactgattggagaaatatcaaaggacaagtattggcatctggtaatggtactagacagccttctcgaaagcaatttttagagtcaagtcctagcgattccaaaagtactgaggcatcaacaagcatgtctgtcgatgatctcggtgccgttgattcggcttctgtgccctccacctcaagagcagcagaggtaagaattaagttaaagaaatgtttcttggaattatgcataattctagtaacatctttttttcattgtcagatgagtatcataattactttgctaatacatttttgcagcatctttatctgcttccaaataattcggaactaacctagttgcaatggtttcaggtgggggaatatgcaagacatccatctgtagcatcttcaacattagtagagttaactactcgtcttgactttttcaaggaacgacggtcccagttgatggaacagctccataaccttgatttgaattatggttctacaacttcccaagactttgtctataaaccatcttcgccgtcgtggagttgactggccaaataataggtgcttcataaaatccgtggggaagaattttggctgacatgttgtatatcctttgagtctgacttattgcatatatttttatccttcatgggtctgtgtactgcttcattctcttggttcctatttaatttcttcttttggtagtgaagttcattgaagttgaaatgaaaggctttccttttggtcttcaggtttctctttttttaataacattgagttcttttgtttttttaggggagggggtggaatttggtgtaattatatggcatgtcaatagatggggaattttgttgaacaaacagctaaagtgaagaaatattaattaccgttttggcaaattctttgtacatagggacatgcaattgccagtttatgtcacctatgtggaatgattggtatgtatgttattgttatgtatctagctggttgtttgtgatgctattaaattatttctttagtataacgctcagctttttactcctgcgtattctgactttcctaaaatcatctcaaaagcatggaaaacttagcatgttaggtggaaacgagtcttgttcgttttattttattgaattcgtttttaagatgggcatggctaacaatttgtatttattgggagatataaagttgatttagtgggagaagagaagagggagatgttgtaggtttgaatttttcttgctaacaaaaaataaaaaattaacaattaatactggcctttaaaaaaatattaatatttacccttaagtatttgtaaaaaggttgctcttttgtcgttgaaaccaatgcagcaattaatattaaaatagaacagtacaatttggtctagttcagttatttatttcacacatgtatagatttttttaaatttttttgatatgaatcactttatgatatttctttacattatgttattattgagataaaaaaatgctatattattgacagattattgactttggtatcagttaccttagagttaacaccggtgatttataattaaataataatataaaactattttatattattactattagtgcataattattaaaatttactattattattattaagtgtattcaaatgttcaatagattaatcctgatgtatttcttgttttaacaatatataactatagtattcaaccaataagaaaatacttttaacattaaatatttcttcaaaattaatgatacatagacacttttattacaaacatacatttaacatctcaacatctctttctttttattacattatatctcttattatatttatcacatttctctttaatttctttgtctctagtgttaatgaacacatcagtgttcacaaaactttaaactttttcaacgataaataaattggtttagaggtaatgctaagaataatttatatgaccaaaagagtattctgaaaccactcaagatcaccatttgtatagacttgaagaattgaccataatagagagagacaaataaaatgttgtataaatatgagttgttatatgaataacacaactcagcctaaaaagaaaacatacgcaattccaaagaaacaatagaagacatgggagtaaatgtaaaatatttagagtaaattacactgcagagttctaactatattgctgcaatgacatcaagtaatgtaaccattatactccttttacgggtttgaacaaaagccaccatgatacttggtggggacaactcccaaaggtgtctgattggaatagtcgcgtagatggaactaaccactccccatttccaccaagcattagaatcattaggagccaaacaagtaaagtgaaaactgaaacctttttcctttgcaaatttctttccactaaatgactaccatgataaaatgataaccattttctaccatcaaaaagcgaactcaaatcagttagatatccatacgagtattttctttacattgacttacaaatgcagtcgctactagttacattatgttttcatatattcttgtgttacacaggcattcgcttgcctctatagcggtcaaacaactgcaaaaacacagaaaattagcaagctcagttggacaatttcatttacacagaagaagtatcactctacaatctctagacagatatatagaaccaacgtttaatgtcagattcctcatcgagacccaccaggataatgttaaaaaaatgaacacaatgacgaaagttttataaaaaacatacatgcaaaaagggatcagccacctccacctcccaaaaaattcagaggactgtatggcttcatttgtagttcatcgtagcctcattgaaaaagtgaaaatgtttttaggcctaaacttaaagctcttttttctaaattcagcatcataagactttagtttgacattcactaaacactgttgcttttcctctatacccaatatctcactatcattcacatctattaatgaaaatcaatattctccaatcaatcaaagtgagtaaagatttcttgataactttcatgaacaccaattattgataaggtagcacccagactggtaaatgtgtaagatacttttgtgaagacttagatgacaggttaacgcatttccattcatcacaaatacataccgatcgaacaaatggttgttgaaataaccaaccaagaacaggaatcttctgtaagaaaacagccagcgtgggccagaaaccactgcacagtataatccacaattagctttaagcatacagacatactcaaacataacagatttctttcaaattgcaccaaacctgaatagtacgatgaatccgtaagcctcaacaatcatgcccaaaataggccatcccatgatgagaataaagaacccgacaccaaatgagattgttccctttaagaagagtaaaagtgagcagggaaaatttaccatgaagacagcatgatgcaccaagtgaaaagacatgtacaagtttaccttgaaattacttcgtttcatgaagaattggatagtggattttagcccaatggttatggacactccagaaacaaacaggatctaatcatgcagataacaaggtataaaaaaagatgtattaagtaaaattaaatgagaagcaacttctataacaagtaactcgtggacaaatcttacatttcccatggctagcaatcccttgtcaaagaagaagataattccaaggaatgaaaaaaatataccaaagccagttaatcctaatccaatctctgtatcatgtgccaatcaaatacattaaacatagcaataacaaaattgtagtagatataaaaaacgtaacgtagaaaaatagtacagtttagtcaaatcaatccttatgccagcaagtatgataccacaacataaagacactaatatatttcatgaaaaatctataatgttattactaggcaaactaataacatacatcttaaagatgtctttcccccaagaacctgaagaaaatcagcttgatggattggaataccattacttacaatgtgataagcaatgccattattggcggatttcaattagcatcattaggtgatgtcattacttttaaataaccaattttaagaaaaaaaatattcctataaaattacaatcatattacttttgacaagagaattgggtaaaaaactacgtaccccatagcccggaggctctacgctatgcgcaggtaaggggaatggatattgtatgcagccttaccctttgcatatgcaaacagactgtttctagattcgaacccatgatcaacaagtcaccaagacataactttaccgttgtgtcagggctcgccctctgacaagagaattgggtaattaacattaaattataaaaatggctaccctgtctaatatgtttatggaattatagctaacaccccaataatttattctcactcataagcattaaagacaacagatcacttcatataatatcattttcttgatataagaacaaaaatatcatattacacttactcttccgatcattcatctcaaaggaaaccattttgcaaacaattcagatattcaagcaccttgcccttgctgaaacacaattaaataaccaaactcggtcaataaatgagtgtgaatcatattctttatggacagtttaatttataggttatattgcaacactaccaccatgggaaatcttaatcaaagaaaagatcctgggacaaccaactgcaatgttcagctcccactgaacaaagcatgtgctaaactttaatttaaccgcccataaaatatcagtttttcaatcgaaatagttctcggatataaagctgcttgtgttcagagaaaagcacaggcaacagtataagtaacaaaagtttaaaatagtagaaaagcaatttgatgttttactgttatagcaattcaagtataacttgtaatagaagggcaactacgatgatccatgaagaaggtgtgcatataatgtacaactgtcaaaccaaaaattcgagtcattctgaaagcccacatcagttagtcaacttgaacaattgataccaacaacattcttctctaatcaataaattatgcaagaatagtcttgagtttttccaaaattttggaaccccactatgtattaacaactgataaccagctttttctttaactaaattgctcattttccactcctttagcctaaaggcaaaacgcaagtcaagaaagaaatgaagaccaaacataaattttatctgcacacatttcaagtatagcattctaatgaccaaatagtcaatacctaatccagggctcaaaaattgaaggctatttcgctacaccctttactcacactcacaccttaacctaccccaataatacttacaggatcaaaacccaagccatagaaaccagaaagtctccacaaaaactaatacagtaataactactaagcactagatctattaagctattcaaaattaaactaaagcatcacatacattcaatattcactacaagtgttgcataaggtacggtcaaaatcacattaaaaaaatggaaaacagatgcaaataaataataatcataataataacaattagaaagctaaaattactaaacccaaaaagaaatttgcacatatactagtcatatagccacttttacttctacataaatattttcgagctttctcgaattttgaataatcaaatttccgtagaataacgattgagaacacggattcgcagcgcaattaacaattatcctcctcggtggctaagcattttaacaacgattgagaaagtattcaacgcctctacttcagcgacacctcttatgaaaacgaagttacgtagtgctgctactgctatgaattctggtgaagaaaatccttcgaaattgaatgtgaatttgaaccgagcgattcagagaaagagagcgttcgggatttgaaaaacgaaagcgtagtgaaagagaactgaagtgaagcgatgggatctcacatctttggtttcagtaacagaaacaaatcgatccaaaatcataaacagaaaaaaataaattaaaatgcacgttcactcgttcggggagaggtagagaggtcaccggtgtcgggagcgaggcgtcgccggaattagttggaaatggtcgccggacgtggtcgtgccgtggtggtgttgaataagaaagattctcaattctcaaatgcaaaatattttttggtcagaaaaataaaataaaaatacaaaaaattgcattgataatataaaattttataaatcgtcaaaactcggcccaatgttaatctaaccatgtacgggttttgaaagttcaaaatctcggcctaacatatgaatatcagccctccaaaattgcttttagcccatagcatgaatgcttctttcctaaccaaattatgattttgtttttgttatataaattgatacaaaatggaagtataattttattgtgtaataatttatatagcaaaattatatttttattgtactttttttcagaaaaaataatgtataatgaaaatttaattatattatataatgtagaatgaaattatatttttgttatactttcttaattaattttcacttgtataataaaatcgtgattcacctaaactagtagaagtgcgaaaaaaagagtaaaaaaaacacaattgtgagaaatgatatttttggaatttgaaaatattggtaaggaccactaacaatccctaagtgttacaccatggaggcaagagtgtctcaatttagtcttgagactaaaaacgtgaagagacttttaataacaacttttactacttaacagttttcttctattttatttatactaaaatgaaactttaaaaatatatatatacaaaacttatattattatcataataagactagcaaaattagaaaaatcataaaaaaaaataaaccaccagtatttaaaattataatagtatttgaaggtatgagaaatatggtgtgccttgtggacttcctataccttattttcttaaactttcatttgacaaaaaaaagttacaatagtgtctttcttttgtcaaaaataaattatatgttgcattacattacattaacaaacgtttttttataaactcatatattataaatttataacaacttatacatactatttatcaactaagttaaattctcttaatgcttcaattgagttatatattctacactattacacacaatttttttaaaaaaaatatagtgaaaatcacaggtgcttttcccttttccaattcttttattgcgttatcaaaccttcctctcccgttttttcaatgcgctcatcctttattgttattgtgttgcttattcgcataaacatattgtatcgttattgaattcaatttcatggatctggtgttgtttcttcctatatcgaattccatgcaactgctttatcagtgggaaactgatagaaagttgtttttggaattgaatcatttggtacatttaattttggttttcgactctgattgtgtgtgtttagagctcaatgctcaacttgatgtttggaatcgtatttgattaagtagagttttcacccaagctttattttgaattttttatcgcttagttgttaatccctcattaagggggtcaaattggaataactctttgttttattgaattctagctttgaatgtcacttttaatgggtacttttgtataatgtggtgcattttggtgccataatagccatattactttttagagtaaattacactcccacttggatattttttcttatacttgataactcttcttttttacaccatataaaaacatcatgttacttgatatctcctaaacattatttaataatttaatagaaaatagacacatgttagtcacatgacttttaatgaaaatttatgtctaaaacatcctcatcttcttcctcaaaatcacatcttgaattttacaaacccttattttcttcaacgacccctcttcacttaccaccaccacctccttctcctcctcctccccctcccacggcatcatcatctctttttcctcattgtcgtcctcgcccaacaacacggtgtccaggtacacccactcttgctggaacaaccaccaccaccgtagttaccgccatatccacttctaccacctcctcgtctttcgccgtagctatgaccaccatcaccgttgggtctggtttcctagaaattggcgttagttaacaacattatcagaatgtggtaaaagtaatgtattaaaagggaggggtatcggatacaatttgagaaaaaacataggggatgcaagtttaaattaatataacggtcaatttcgtcttctcaaatgtttcaattgaaattatttaacaaccttaataaaagggggtaaaagtaatgtataaaaaaagagggatatggagtgcaatttgggaaaaacacgggaggtgtgggtgtaatttcctctactttttatctcaattacttgaaatctgactctttaaactgagctattttgtttcattttttgtttgtaggttttatgtagctagagtttagtccctatggtagagatggataaagtgtctgctccttcctcacaggagcgtgcacaacgcctttatgagaaggtacacctctctctctctctctctcataattatcacggatgttattactggaaaagagcttatccatgtgaatctctcgtaatctgccaaatgttaaggaatctggttaatcttaattaactcaattgtactcttggtacagtgtatctgcatatagaagtttcactttggaggacatttattggtgttcattgatccttttagactttagaggtttgggtttgattaattggtgttattgttcttcctctaatgggaagataaccccactttgcagggttgggtttgctctctttactatgacattgtttggaattattgctggaccttgttattagtaccttctggtgtatactattattgccaggaaatgctgcatgcttggtgttttggccctttgatttaaggtagcctctggcaattggcatacagccttacactggttagtaagtgcttgtcttgttcttgagttgtaaattaagaacccataagttgctgttgtctgtcatggcaaaccatgtagaacgcataacctgtggttttttgcgtgctgaggcttacttgttcttctgattaacttgataagattttttctttcttttctgtggaatgaatacaaaagatatatttttaatctcaatatttttctcacttagaaccttgaattggagaataagcgaaggagatctgctcaggcacaggtcccatcagatccaaatgcttggcagcagattcgtgagaattatgaagcaataattcttgaggatcatgctttttctgagcagcacaatattgagtatgctctgtggcaattgcattataagcggattgaggaattgagggcatactttaatgctgctcatgcttctgtaagctcaaaatcatctcagggagggaaaggtcctgttcgacctgactggataactaaaataaggctgcagtttaagactttcctttcagaagcaactggattttaccatgatctgattatgaaaatcagagcaaagtatgggcttccacttggttactctgaggactcggagaataaaattgtcacagagaaggatggaaaaaaatcttctgagatgaagaaaggtttaatttcttgtcatcggtgtttgatatacttaggtgatctttcacgctacaaaggcttatatggtgaaggtgactcgataaagcgtgagtttgcagcagcttctagttactatttacaagctgcagctatttggccttcaagcggaaatccccatcatcaggtttttggcattcctgtctctcatgtgctttgcttttggttgttcacatttgttgttgatcacggtttgtagctattgtattccattttgacaagtctgttattttcagcttgctttgttggcttcatattctggggatgagctggcagctatttattgttattttcggagtttggctgtggatagtccatttacaactgccagggataatttgatagttgcatttgagaagcagagaaggtaatatgaacatggggatgaactggcagctgtttattgttattttcagagtttgactgtggatagtccatttacaactgccagggataatttgatagtttggcatttttttcatctagaagtctcaattgtttgagatgtatcttgtttttgtttttttatgtgtttttgcttacttgcaaactttaagtatgatgtttcaagttcagtcttttctgctacttgtagtgtttggtagtcaaagctaaatgcatttggaagtttataagttgtaaatttctcactggcttgcaatttattcaaggattgagacgtgtaacgtggagtttgtgtatggcattataagtatgcaattatatttgatattattgaaaactgcaacctagcataccttttcacataaaggagttctgtttatttggcatggtagggggtgaagaattagctcttgagctagatcctctgtttattttcatactgtggtgtgtgttgttgactcttccccttttgtcatatatatgatctttttggcattacttctaactatctattttataataccatgatagaatcgtcaaagttgctctcagctttctggtgatgttaaagttcttgcagtcaatgtaagaggaaaaggggaagcaaaactcatgaccagggatactggtgtggaaacctctcttagaaagggaggagcatccaatatacaggacacttacaaatccttctgcacgggccttgtccgtctaaatggaatcttattcactcgtacaaggtatatattaatgcacaaattctatctgaccatcatatgcataaaactattaaggattattatattctgacttttttccttttctttgtttctcatatattgtgatgatagccttgagaccctcactgaagttctctctcttgttagcgctgccctgcgtgagcttctatcatcagggcaagacgaagagctgaattttggcacagatacacttgagaacaaacttgccattgtcagagttgtttccactatcatatttacagttcatgatgtgaataaggaatctgaaggtcaaacatatgcagaaattgtacagcgtgctgttctacttcagaatgcattcaccgcagctttcgaattggaatacaattataaacggtcaacaaagcaagctgaaaataacagacttgtcaaacaatgagagaccgtttaatcctaaattataaatcacatggaaagaaaaagactttgacatgctgtatgtgtattttacgaaaaagataatatggattaattatagtgtctttggattttggctttaaaattatgaataaacataatgagatgagttaatcttgattttatctaaaacttgttaaatgattcatgactcgcagcgtagtaattttacacttttatataatattataactttttaagataacatttatttatttttattatcattataataaatatttatgacactttaacaaaaccatgataataaaaaaattacaataattattacaaaaacatattagtgttaattaaattataatccattaattagtaaaagatataaattataagatgaaaacatcctgagttttaaaatcaatactatctggattaattagggtcggttcaaaaacttctgaatgtcatattactatccaagatctaattacctgttttttctaattgtatgtgcttgtttgttcttccattttctccgtatagattacgaatgttatagtagaacatgagtagcaatatagagaaaaataaatgcaaactaactaaatgataggataaaacaaaacaagagagatcaaatttaaggtattgtgtttgtttgaggaagataatcgcacacgaggttgcaatcagtattaaaaaaactatcttcaaattggacgattcaactactgaactggtcaactaacatgtctgaatgttgatcagtaggctactggatcgatttgcaattggtcaatagactatcttttagtttctttctattcacaaactcttttttagcttagcaaaacttgaaactaattctttaaaaattaaaactaattttggtttagtttagttcacaggaacaatttggtgcaatctgtctatttttggttcagagcaccaaaacacttcagttcgattcagagcccaaagctcaaagcccaagtatgaaagtaaattatatgcacttgtgtaaattttccatgcctttctttaatttgctgacataaggggattagagcttatcattagcaaaaatgggttcactacaagaaaaatgacatatgcttaagacttttgcctacaaacataaattattatacataaaagtcaaaaaaattatatctatgaacacttttgcctacacatatattttatagtaagtaaagctaaaaaatacttttacctataaatatttagggtaagtaaaatcttgtattaatataataaatatataaaattaaaaaatacttctacttacaaacatttagtataggtaaaacttaaaaaatcttgtgcctacaattattcgatgtaggtaaaattcttaaaggtttctgcctacaaacatttcgtttaagtaaaattttaaacaacttatacctacaactatatgatgtaactaaaactcataaagacttctacttacaaatattgggcgtaggtaaaacctttataattaaatttactataaatttaaaatatattttatacatttaaaaatatttatttagtatgaattatagttatataaaatagtatttatagaaaatttatttcaaaaagataaaaagatagaaaaataataacatcataatttatttcaaaaaataataaaaaacttaaataaatgtattaatgataaaaagtgaaaaatataaaaattagaaattaaaagctaaaaattacttgaaataacaatttaacaagaagttacttaaaaattatttattaaaaagtcaaataaattagtaaaaaaaataaaaatttgttaaaatgtcttgtaaaaaacaatatatatcaactaataaattcctttaaaaactatactccttaaaacccttcttcattgttgcaactccacgcgccaaatctgcaaccattaagttatgctccagcaccactacgcattgcttattctcagcaccaacggacaggcgccggcggcggagccgccaccacggaggacagcagaggcatgagaaagttttgttggttttctgtttctaaaaagatatttcataaagatagaaataaaagaaatatgaaggtttagatatttagtttatatcttttattccatacaaataagaatatttagatattcattctatatctttttaggaattgaaaactgtttctgtatgtggtccatttattgaccatgtttattcactaacccattatcttatcccattcaaaattgaattctatgatggacaaaactctataaatagaactggacactctcttttttagatcaccaagcctaatcgagtttgagtgagtgagatactggaaaactaaaactttgaaggttacttgaaagttgatagcaatggctggaggtagatacctctaaaatttatttttctatttccgttttcgctgtatgatttgaatgtgttgtttatgtttgttaacatgcatattcagatcaatataaatgttttacaagtttatgtcacgacactcgcatatgaagtatgaactcaaagattcacctggttttaggtattgaatttttggagtttcgattctgaataattgaatggtccattgatttgattcaattatggttggaattgaaaatatgatttcaattttcacgtgtgttacttgactgtgtagttcctattggcgtgtgcggaattcagcactagttcattggttctgattccgcttgtgattgttcctgccatgggaggcactcatgtgtgttgttttcgtgtggcttagttgttgtttttcgtgttgtgttgtgattgaaaatttggaacaaagacagctgataatatttttttttttatcaaattgaagaaattcaagcatttaatgagggagctccagggggctatagttattggctcagctttccaaactttacttgggtatactggacttacttgctatagttactgtttgcacctttcaatttagattcctaagcaaatcacaccttaaaagtttaaaattatataatcagcttacgaaacttttgaaaaattcgttaaaattttatagacttaatacgcgacttgcattcataccaaaagtcaagtggtagaaacatattccttgaaatccgttttgggtttcaaccagagccagattacccttcttggtgttgccaatgatattggtgagaatgttggcattcttccaggactagcctctgcaacaatttattattcgagaaaacaaaggcattcttccaggactaggaccaggacttgttattcgagaataattgtagtatgagtatcaaacattttcaaatttgtgtaaaattgagaatccttgtttttttatttattattattattattattattattattattcctttattcatatttgttttcattgtattatttgattcattaattaatggctattaatagtattgtttgttaagctgtacatggagttgaaagggcctagttaattatcacatctttctatctatggtgttgcaggtatggtttgattttccacactttaaccaaaattgatatgatatgttaattttaactgagcaaacattttggttaattttaactgagcaaaataaaaagtctgtgcccctatcttacgattccgaacttacataaatttggaatccaaattataatttgttgtttccataataattccaaaagtttggtaaatgatatgatatgagcacctttacgttttgatatatatagcatacaatattccaggttttcttgcacagtacacaattttgttcacgaggcttttcctccatatatttttaacacaaaaattaaagttaacttcattttatcattttctctaagtagccaataaaaataagttaatcactttcttatccgacctcacttggtatgttgcaggaagtctgaaaaatcacttttatttaaaatgtgtccaatatctttaaatttatttatttatttaaattatttaccttagttaaaatgtttcaagttgtcaattacttgaataaagacgtgtgaattattcgtctatactcactccatggacttcaccttctgtgcaatttgcccgtgcttgctgtttgaattgccaatatggtaagcagaacctgcaggttccatagcgaacctgacaagcaaaggaattgcagtgtacaatcacaagggccataagatgtggcaacgtccagaaaataacactattgcctcagtatcatgttgcctggtcagaatctggctaagtctaaaagatttttgtcgtccgaggaattgaagtttagctaaataagagaaattgaatcacataattaagacgaccaagagattatcttagggtggaatcaagggaatttcaacacctaatcatttttattaattgatttttctagtacattattcaattgtgctcttgtttctttcaattacatataaaaaaagttcaaaaattcctaattgtttatctcttaaatcaaaagagtaatcgataatttgattgatgtattttgataaaccaaattttttattgatacaataatttctccttattttatcaattgtacaactagtacactacactagtcgtaattctcaacaaactacaacaatatatatgctggtagaaggtgactcagttgatctttaaatcactttacgtgaagtccacattgcccacagtaggattagtgttagaaaacattacttgttcagagtaaatctttcaatttaatttccatagaactaaacgtgatggaaataaagttagtagaaccgtagaaatatagatgacacaatttgtttgatgttaattaatgtaaatgtactttctattgatattcaataaatttgcatgttgtcatcgttcaaaaataaaaagataaactattttctaaatttatctttttagtttttgaatttttatttattttttaatcacttaattttttagtatatattacatttttgtttgcttggaactataataacatgcatatccgtagagagagtctcacaattgatttttaaggcagcatgacacttcacgacaggttcattccattgctcaaagttggattagtgctacagttaagagggaaagccttaggcttctactaaactgaactccaagaaaaaataataagatgaaaaggatgtattatttagatgaatagaaataaaaaggaaaaaaaatgtaaattttaattagtttgaataaataagagagtagaaaaccaaaatatggtcattgcaaaaatgttcatcaaataaaaaatcaaatttaatttgaaaaacctgaactttttatttaattatttctcaacataaaaatatatgttttgttataaaacaataatttaatttttttaaaatttaaacataagtaaaagaaaactgctaaccatttctccctccatttcatgtgtgttagtgagaaatatggtttggttaggactcattaattacaatttcatttttcattttttaacacattcaatcaagactattttttttatcacttttttctcttcattttaattttgttgtatatagtaattcttttcaaatcgagtaggattaagtctcagtgaaagatgaatgcgtaataaaaaaagcttttactgtgttatgatttgctcccttcaccaacaacatggaaggaaggggaaaagttttgaggtgggttatgcagtatagtctcaaattaaggcgggaacaataagaaaggtaatatttcatgacatagaaaatgtagaataatctcaaatttaaacacaagcttcattgttccacaaacaaataataatacagtgccttaaagttatgccaatgtctgtaattctgtaataagttagtcctgtttggacaaacgataatatctagaccacaattgtttgtcgaaaaacttaaattgaaagagaagaaacagaagtattgggaaaacccccattgaagccactacataagaaacccacttggaagtgtgatcaaatatcaaaaaggaggctgcagtgaaatccacaaccatagcagcaacagagataataagtaaccaacgcccaaaagtcaagctgggatgtagtgatatcacaaattcgctttgtgcgaatcttgatgaagtgaaatttgacaagaatgagagtaaagacgcagaagaagcaaataatgcgactgcatttgtcaatatgaagacagtaaaccacacatcggtcttatcacctggaacagtcagagcagccgcaaatgctacggtagcaacaagtgttgacacaagcatgccagaatcggccattcctttggctgtttccttaatttcttcggataacttcttgtgttcatcacaaaatacatcaattggtgtcttgcccatgttgtttctcattgttcttagttcatgaggagcacaccgctccacgaactatttaaaaatcaagagtatatgtaaatgatggtatccaaatgcaaaacttaattaatcttttcgttatcacttaataactaagcatattacagcaatatctcctaaaatttaatgtaattacacaaacatttattgagatattagcttaaaatttgaggaaatgtgaatgtaatatttttaaacatataaaaaatgttaatgtaattttttaatcctcaaaaaggagttagtataagaaaaaaaatggaattacatataattacacgaaacttgaggagaattattgtaatttgctctaataactattagatattaaatttgtaagaaatacaatttaaaagataagatattttaaaaataaatcttacgggtgatatttattgttacaaatgtacgtgtataatttttaattaaaatatattggctgtttaactattatgctaaagacaatggataacaaattttaaaaaattattacaataatcaacaaattctgcatacaatgatttctatttttaattaaaacatgttacttttaaagatttaaatcagtctagttaataaaagcctaaaatttgtggaatcttttaactatcacctaataactagagcaaattacaacgccactttacgaggtttagtaaggtttgagggaatgttaatgtaatgttttcaatatatgagatgttagtgtaatttttcaaatttaaaagaagttagtgtaaacttaaaagaagttagcgtaggaaaataaaaaaataaaattatatataattacacgaaacctcaatgaattattgtaatttgctttaataactattacatattaaattttaagaaatacaatttcaaagttaagatattttaaaaataaatcttgcgggtgatacttgttgttacaaatgcacttctataatttttaattaaaattttctatcgatctatatattgcctgtttaactattatgcatgctaaagacaatataatggataacaaattttaaaaatttgtcaaaataataaacaaatactacatacaatgatttctatttttaattaaaacttgttacttttaaggatttaaaattggtctagttaacaaaagcctaaaatgtgtggaatttttaaatttttaaaaaaagattgctagaactgatggatcccatgcgagtgaataaagaatggttaaataagaaaaactaagcaaattaattgaccttgaaccatgcgatatctctttgcatttgaatgcttgctcttaaactggaaaattcttcgaattcaactggtggaagatgcgcagccaagtgtagaatgttgttaccttcattgtccacttctcgtttcatatgctgttttaatgtccatagtatccttttaaatattcttttatgtcgaaatagcacaactaagtgcagtagattccgtccattttcggggtcctttattctcactaattcaggctgaattccaataatccactgcacagcctcaacatttcctgattttattgcatcaaacagcactgacgaaggattagttatctcgtctatcatccgcttatgttccaattggttaacttgagtccataattttttaaatagccgaccaccttctgattccttgtcgtcctccatgtctggcaagaggtatatatatatagttgattggtccaaccaatgtttaacacatgaaatcaaacaaacaaaagttaaatttaaattttattcttatatatatgaagcaccatttttttatctctatttcaaaaattatattttaatccgtaatttaaaaaaaaattgtaagatatttttgcacatgtggctcatgtgttgccaaacattaatttgtgttattagaataactcaacaaacatctaataccattattacgctggatatagatatttaaggattaattcttaatttttttatataaaacaaatatatatatatatatatatatatatgggattaaagtttcttatgttacactagataacttttctcttatacatcaaaactaaaatcaagaaacattatctttnnnnnnnnnntatatatatatatatatatatatatatatatattagaatcaaagtggaaattaatgatgtcaaataagacctaaattttagcttagcacacacaaaaataaaaagccattttcaacttgtgaaagcttacctaaaatttttggaggctttcgcgccagcatatgcaatgctgtaaggttctctttatttcttgcaatggccagagtagttggatgtttttcaaataatagcgttgccaaatctgttatatgcacaaattaagtaaaactccaactaaattgcaaaaccacgtacttagttcatatatatctccttttatatatgttatatgcacaaattaagtaaaactccaaccaaattggtctcgacgtattgctacatgaagagctgtgtctccatatttgtttggtattagcatgtcttctggcctcatacgcttaaccaactctttcacaatttcaagactgccatcccatgctgctagatgaagagctgtgtctctacttgagtttagtattagcatgtcttctggcctcatacggttaaccaactctttcacaatttcaagactgtctctctttactgctagatgaagagctgtgtctccaatcaagttttgtattagtatgtcttctggcctcatacgcttaaccaactcattcataattttaaggttacattcccttattgctagatgaagagctgtgtctccatctgtgtctggtattagcatgtcttctggcctcatacgattaaccaactctttcacaatttcaagactgccaatgtataatgctagatgaagagctgggtatcccattgagttttgtattagcatgtcttctggccttatacgcttaaccaactcattcacaatttcaagactactgtaacgtaatgctagatgaagagctgtgtctccacttgagttttgtatttgcatgtcttctggcctcatacggttaaccaactctttcacaatttcaaggctccctcttcttgctgcttcatgaagagctgtgtctgcatatgagtcttttattatcatgtcttctagcctcatacggttaaccaactcattcacaatttcaagactgccttcccttgctgctagatgaagagctgtgtctccactatcatttaacggaatgcgtaccatatcaggacatttatcaataatcctttttgattccagccactcatccggcaatatatgtatcctcagatcttcttttaaagaacctgcaatcctttcaaacttcacattataacatgtcctttatttaataatcataacttttactatttagttgcaaagaagacccttttaatttctcgtttaccctaaatctgtaaaaattctcttggaaacttgtctcatattttgagaattcctaataatttcatcatttcaaattcattttttttttcaaaatgtaaaataaacaaactcttaagacatgatctctgaaatacaccttgttgtgaatgcaatagtttcaagtataacttactcagctcttctggagtcatttcattcactcctctactttcatgttctggtgtcggtgagtttgttgaagtggcaattggggtttgctcatgactttgattaatctgaattatgtggtcatctgaaacttcgctattggagttcatgatttaattctagggaaaatgaagtgatttggagacttctctgaaattccctgttctatcggtgttgcttctttctttccagcctgcgaagcttgaacacattatatttggtggtaaagcaagagtctttaattagttttccaacttacacttaaaataattattcccaatatgacattttgtggattacagcaatgttcaatctgttcaacacctcaaccctacagttttcaaaagctttttaagttgaatgatttctaaatttgtaatattaattcttttttaaagagaataaatatattcattaaatttgttaactgaaaaaaattatacacagtaaattgtgtggattaattagcgagactcagctatcataacactgttaattaacttactctcgatttaatattaactttcttctttggacaatgatatgatcgatatctttacacacctaaaaagtaaactacacaaactatcccttaagttttgtgaaattatataaactttcttatacttttttaaacatttacaacaatctcgcttatagttataggggcagaaaaaacatgaaatgtttttataatttcatgaagccctataaaaatggttaatgcaatttattcttttttaaatgtgtaatggaagaaacacttacgcatagagatgttgcgcaaattgactcagtaaaaaaacccaaaccgaaccaatttattcaaattattttgaccaattcattttaaatccaaatagccaaattactatagaaaattggtttgaaatcgaattagttttaaaaaaaattagtttgaattgaattgattttgaattaattttaaatcaattttaaaattagaatagttttgaattgatatttgaattattttaaaaaaattgatttggatgaaaaccaacttgattaatcgaaccagttttataaaaatgattcggttaattgaacaaacttttgtacaacagtgtaattcatcttttcttaaaccagttcagattaatcaagttgatttttttcactccattatttacggatgtattgtgctttcagaacacctatttagtaaccaaaatatgaatgcatattacgtaaatacatgcaaaaataattacaaaacatgtgattaggagcatatagtacattatgggacatttagataaatataaatgtatttcaaaattcaagtattttgtaatgatattttaaatgtgttatagaagagatattccagaacatcttatggagagatgttctttcagcacacctattccatataaccaaaatatcatactttcaaaatcatatattatgtaatatattaaaaaataataacagaaagggcgcgcatttcaaacacataacgaatatgtgttgttcttctgacatacttattaacctaagtatcatatttcccagaatgggtattccacaatacattaaaaaataattacggaacatgcaatatagaacaaataattagaagtattttgggagccactcttaagtgaggaaggaggtgtaacgtaagttaatttttataggatgcaggaagaagagaaaagatacaactcaatgttaataaagaaagaaaaaaaagaaaaggaaacaaacaaaagaaactagagtggaccaactcaaaggattatgaaaggaaactagcatgcatcacagctatatatacaaattaaaggttgaaggaaagaaatcatacccaaatgtcttgttaatgaagaacgatggagataaagaaatgcccgtgggatgtgtgaggaggacccttgtcttgttgttgctgtacgttgatcagtgtctgagtgacgagggagcggtttctgagcaatgttatatgcaaagagagtgaagctttatgagacttaaggctgtggactatatataatttattaggtggtccggatcaaacacaatcaatatcttcactgttttttatatgacatatagtgttattatttttttcataaattataaactttgaatgcatgttatgtagacattggttgagattatgaatacaaagtgattccacatacactatttaattaatttctcgtggctggcccatgtgccatgacaaaaaaaaaaaattgttgaacccacatgcaaataacgtgtactgattttttgagtggggaaaaagcaactgcagtagacacagggaaaacaaacttctttacccaaaattgttaccttacttttttgtttttgttgtcatttttttgtattttaatatattcctataccttttgcatttatttaatttttgacttatttttatccattttttgaggcgtatatttgaaatgatactttagattaattgtaaagctaagcaaaatgctttgttagattcttctgaatgtcattcttttcaccttccgagaagccagaaggggtcctttattcctttgttaaaactactgcttccaagtattccatactaacaaaattcttttcccaccaggtgggggtggaatatatagataaaaattaaaaagccacaatgtcttattataaatcatgccatgaaactaatcattcaaatataattaatataatttttcttggtctctccctatctctaactaatgcgactatatcctccatttgatcctgatctacttcctttcttccatgacctgcgttcagcacaaaaaaagaaaaactaaaaaagaaaaacaaaaacaaaactaagccaagactcctaattgttggaatacaagtctgagttaaagtcacacatcggatagaattagaaaagttgaatatcatataagtgaggagaagacccataaacccgagtcttaaggttttgagttaaagtgtggtgtctaaattcacttatatggttgctcgtggaaatccccccgatgtttaccctcctcgatttctcaacaagtggtatcagagccgatggttcgacccgtccatcggctcggacaaataagaaggcggattcctgaacatggaaatcctggatccctgaacatggagatccgttgtatcgaaagtcttcctggtggatgaggccgttgtattgaaagtcttcctgatggatgaggtcaggcaacgagtcccgcaagtgttgcggcggtacaaggtggccactacttgtaaattgaaaagtgacttctgcttgagggggaggctaccatgtggaagagactcacacttgagggggagattattggaatacaattgtgagttaaagtcccacatcggatagaattagaaaagttgaataccatataagtgaggagaagacccataaacctaagccttaaggttttgagttaaagtgtggtgtctaaattcaattatatggttgctcgtggaaatccccccgatgtttacccccctcgatttcccaacaagtggtatcatatttgttggataattttcgtttttagttgactgatactttccgtttttatttgattgatagtttctgtttttatttgattgaccaaatcaaataatatttgatggcttaggcccactccattgtaaacccaattcatcctataaatagatgagtaagggtggaagcaagacacacagaaatttgagagcctcaagtgacaatcttgagtgacatatttgagcgagcctgcgtgctctacatttgagaaattcttagagagtttgagtgaaacactctaggtttcgtttgagtaaccaccattattggagaggttgagtgtaccaccaaattggtgtgttcttaattcattataaccgattattgttatagtggatttttgatactggactaaatcccgtgagtttttccttttttcacattgaggaaagttttctcacgtaaaataaattctgattgtctctctcgctccctttgattttatttccgcttccgcaatttgatatttgaggtccgagatacccaacagtggtatcagagcccgagttcgatgggttctaaagaagtctagatggagaccagcggcataactcacgacggagatatgttcaagttgaccgcagataacttcaactattggaggttgatgatggaggatcatcttatctgcagggatttatatgatcccatagtcttggaggagaagccgactggcaagttagacagggattgggagatcctgagtcggaaggccgtggctacgatcatgaggccgtggctacgatcatgaaatacattgacaaaagcctctttgagcacatgtccaaattcacgaacgcgtacgagttgtggaacaagttagagtccataattcagaagaagactcctaggaacaaagcacatctggtccgccgacttgtgaagctagagtacaaggacgacatgagtatgatcaagcacctcagcacctacaaagaaatagtgaatcaactgtccaaagtcaacatgaagattgatgacgagatgcaggctttgttgttgctgagttcgttaccggaaagttgggatactttggtggtgactttgagcaactcggttctagaaggaaaactgacgatggatgctgtgacagacagcctcctgaatgaagaagccaggagaagagaacgaggtatatctagcacgtttgaggctaacggtgctgagaacagaggaaagaccgactctcagggtcgtggcaagagccgagatcgaggtggacgagataagtctagaagccagtcaaggccaaagcatgacttgaagtgcttctagtgtgggaaggtaagacacaagagaccagactgcaggactctgcagaatgatgaacaaaacggctgtgtgaagctgaatcaaattgttcccagaagaagaagtgatcagagcaccacagcggtggctgctaatccgaatgccgagatattcctactcagtgaggaaatgttgaacatagcccatcatgactgcacctggattgttgactccggtgcctcgttccatgtcaccccacatgagggattcttctctgcttacaggaagggagattatggtgtcgtgaagatgggaaatcaggtgaccagcaggattattggtgttggtgatataaccctgaccacagacacaggatgccgggttacgctgaaggatgtgaggcatgtacctaacatgcttttgaatttgatctcgattggaaaactagatgatgtcgggtcagtaaattactttggagaaagtagatggaaactgaccaagggaagcttagtcgtggcccgaggaaagaaagaaggctccttatatgtcatgcaaggaaagacaccataagcttggagctgtggcacaagcgcctcggccacatgaacgagaaaggactctagattttggagaagaaagagctattgaccgggttgaagggtcaagtgttggagagctgctcgcactgcctagctggaaagcagcaccgagttccgttgtgagaccggatcaacctaggagacggaggtgcattcttgacctcgtccatactgacgtgtgctccatgttcgagagatcactcggtggagctcattactttgtctctttcattgatgaccattcccgcaaagagtgggtttatcttttgaacacaaaagaccaggtactccaatatttcaaggaattccatgccatggtggaaaggaagactggcaagaagttgaaggtggtcaaatctgataacggtggtgagtatcgtgatccctttgaagcttactgtagagaagccgggatccgacttgagaagacgccccccaagactcctcagctgaatggatgtgctgaaaggatgaaccgaactattgaggaaaaggtccgaagtatgctatcgaatgccagattggcgaaagcatattgggtagaggcagtgagaacagcagttgatttgataaatctctcaccatcacgaccgctggatggagagattccagaggaagtctggacaggtcggagagcgacctatgatcacctgagcgtgtttggatgccgagccttcgtgcatgtccctaaggatgaaagggcgaagctggatgcgaagacgaaggagtgcatttacctcggttcgccaaaaatcgagtttggtttcagactgtgggatccaatcaacaagaagattgtgagaagccgagatatagccttccatgaggatgagaccattcatgacatctcgaaacctcaagtccaggttactgtccgaagagaagaacccgcccctcgtgaaagtgttgaagcagggggagaaaccagtgaagaaatcgctgaaggcggtattgtagatgatgaccagcaagaagctgatgatgccgggatccgaggtgagaatgaagaaccgggttctgatgaggctgaggaaaatagccgagataccccactcgagaaagaataccttctgcaaggtaccctgatgatgaatacaccatcattgctgaagatggtgagcctcagagttatgatgaggccatgatgaactcagagaaaggagaatgggagaaggccatgcaggaatagatgaaatccctgcatgagaatcagacctatgagctgaccaagctaccctaaggaagacgagctctgaagaataagtgagtgtacaagatcaaacaggaagagaacggacagaagtcgagatacaaagcccggattgtagtgaaaggctgcaatcagaagaaaggagttgattttgaagaaattttctcttctgttgtgaagatgacctcgatccgaactgtgttagccatggcagctaccatggatcttgaggtagaacagatagatgtgaagatcgcattccttcacggtgagctggaggaggagatatatatggagcaacctgaagggttccgagcaccaggatgcgacggcatggtatgcctgttgaagaagagactctatggcttgaagtaagcatctcagcagtggtacaggaagtttgattccttcatgacaaagcacaagttcatgaagactgaagctgaccactgcatatttgtgaagaggtatgagaacggagactctctgatccttctgttatatgttgacgacatgctgattgtaggacaagataagatgaagattgctggattaaagaaggcattgagctcatccttcgctatgaaggacctcggccctgcaaagcagattctcggaatgaagatcatccgagacagaacgaagaagctattgtggctaagtcaagagaagtatgttgagaagatcttgaagagattcagcatggacaaagccaatacaagcactcccctagtcgggaacatgaagctgagtaagaagcagtgtccgatgtctgatgaaaacaaagacaagatgctggagatcccgtaccaatctgttgtcggaagcttgatgtatgcaatggtatgcactagatccgacctggcatatgcagttagtatgatgagccgatttctttcgaatccaggcaaggatcactgggaagcagttaagtggatctttaggtacctccgaggtacaaccaatttatgcctccgatttggagatggtgaagccaagctgcaaggctactcggatgccgatttggggggagattccgactcgaggaagtcgacgactggatatttgatgagatttgatggagaagtagtctcttggcagtcaaaattgcagaagtgtgtggcactttcaacgactgatgccgagtacattgtcgtgaccgaggcaagcaaggagatgttgtggatgaagaatttcctcatggaactcggccatgaccaagaaaagtacaagctgatgtgtgacaaccagagagcaattcatcttgcgaagaactcgacgtatcactcccgcaccaagcccattgatgtgaggtatcactggatacgggatgcggtggaggatgggaagctcacacttgggaaggtgcacaccagttagaattggtctgacatgatgacaaagccggtaccagcaataaaatttgaagattgctgtgaaggagttgggctgaggaactcggcatgatgaagccgaggtgagaaggccaagttgttgaaattgaagacctcggtcgcattggaaaaacggaagggggagatttgttggataatttccgtttttagttgattgatactttccgtttttatttgattgatagtttctgttgttatttgattgaccaaatcaaataatatttgatggcttaggcccagttcattgtaaacccaattcatcctataaatagatgagtaagggtggaggcaagacacacataaatttgagagcctcaagtgacagtcttgagtgacatatttgagcgagcctgcgtgctctgcatttgagagattcttagagagtttgagtgaaacactctaggtttcgtttgagtgaccaccattgttggagaggtcgagtgtaccaccaaattggtgtgttcttgattcattgtaaccgattattgttatagtagatttttgatactagactaggtcccgtgagtttttccttttctcacattgaggaaggttttctcacgtaaaacaaattctaattgtctctctcactctttttgattttatttccgcttccgcaatttgatatttgagggtccaagatacccaacactaataagacatgaattagccaaataatattactaagattttcaatctatatcaatttttgttatgttcagaatacagataagtatttttcctagacctacagtccaaaagcacatagagaaagagtcatttactgagaaagtgataattctaaagaagcatgcttacttctctaatggcacatgcatcttcgtctttgctctttttcccacgaggaaaaaataagctaaaccatgaatcatcaaatcaatccagcacgtcattgaaaaataaaaaatgaagaccaaaaacataggaaaaagtgtagaacacagtatcatccccaattagtaactatttggcatttcataagaacaaaacgcacttgttgaagatccagagcctccgagaagagcaccatcgtaatccccggccttccagaactgctgggagctattcagactcaaactcttattcgcattggcgcgcaatgccgtcgaattagaagcccattctagcgccagtaaggacaacatcgtagtgcgagtaggcgcgggcaccggagggagacgcgtgaggaatccaactggcaaaaccactcctccagcctcgctcatcctcacttcttggacggactctctaccgaagaagaagcatcgttcactgtgttggcgactgcactgtccaaatcatggtcctcgtcttcatccatgtcggaatcgctgagttcaataaccgaacccagaaggggccccgaaacgacgccgtttcttggcctcctctcggtggcaatcggagtctccaaaacttcttcttttacgcaaacatccatggctggctaaaacgggagatgaagattcaacaaacaaacatgtaaaataaaaaatataaaagattgaagttggaaagttaaaatctcaacgaatgaatcaagtgaaggtgatgggaatggttgaactaaaaaggggatttggctctcgtagaggggaggagaagaaagacgcactccgcccttgatccagggaatatccaaatgcagcacgaccacaccttaacggcagcgcgagagttccacggcggcgacagtcgacaaagactacactcccaccaacccatgatcattccacgatttcaaaaaatggagcttttgaagcgaaaccctaaacgagagtgaaaagtagcatagacatgaacttcaatttggtttcatagctttaaaatcaaagacagttctccaaaaccgtcttcaatttgggatcaattaatgtcaatgcataacttgattaatcttttaattaccacttaataactattacaagtttatgatattaaaaataaaaggaattgacctagcttgaaccatgccagctagctttctttctatttgaatgattgctctaaaactggacaatgctttgaattcaagtggtagatgagcaacttataagtgtagaacggtgttaccttcattactaaaaaaaaatgcttattttaattccgtccattaatgttggggtcccttatcatggtcacagtttactatcatcgtcaagaatccaactaagagcctcatcatttcctgatattagtgcaacaatattaatatgcaatagaggagaaaaatatcttaaaacaaaatgagaacaaccatcaacaataaataaatgtaacaagatcacgccacatatttagaaaaaaattttaaaaaaagattttgaagtccttaaatttttatgaatttatataaataattaaaaataaaaaaattaaaacgtgactttcaagtgactttgatgtagttggaatttttatgacttcaatattaaaataaaataaaatatcaaaatcgtaattttttttttataattttatatttagaaatgtaaaaattctacaatttatttctatttagatattaattaaaaaatacttccatttggcaattctaagttgggtatagatggaaagatgcagtggaaaaagagaaagaaaattcggaagcacgctcaaactagcatatcatatcttacttttattttattattaattatatacttttatattttcaatttggtttaattatcctcttgatctatgtacttgtaacaaatttgaagttatatttagtttttaattagtccattgatctattttattaacatttttattttaacttttattataaattaaaacactaatttatatatattacaattttgaatgaataaatatatacataaaaaatattattgatccaatcctaaatataagactcttttaaaaataattcacattttttaaaaaattaattaatttagttattaacattatatttataaataatgtgtattatttttaaaaaaattaccattaaaactttcagatatcatcattttaatattttacttaattctacctacttaattaatatgtgctagctaattatctgaatatctagttctcgtaatttagagagaaaatgaatttactatgttgttattagtttataatatttattataaattatttaagatattttggtaaaaaattaatgcaagagataaattaattaaaaaaattaacaaattttaaaaaagaattttatatttagaaatgaaggtagtgaaaaaattacaaatttatttttatttatcacaagatatattttcctatttacatggttgaataaaaaatataaaaatgtaactcaataaacaatcttgatatcttttagaatataatgcaatgttgcggtagatcataaaatgaagaagcaaaagaagagaaagaaatggactgaacgagaacggaaaacgaaatggacatgcaaagttagcactcacattatttattccgtgggaacgagtggaatcgatcggcaaatgtttccctccatgctccatgctccatgctccatgctccactcttttggcttaggtttgctttgcccaattcattgtttccttgtgtcaaaatcaaaattctatttcagaatatgtgtgctttgaatattattcggttaaaagtatagaaggtagcacaaatcaggtggcacctcttatatgtttgtaattgaattgattacaattaataagtaaaagatacaaattataagatgaaaacatcatgagttttaaaatcaatactatctggattaattagtgttgcttcaaatcaaacttctgaatgtcatattactatccaagatctaattacctgttttttctaattgtatgtgtctgtttgttcttccattttctccatatagattatgaatgttacagtagaacatgagtggcaatatagagaaaaataaatccaaactaactaaatgattggataaaacaacacaagagagatcaaatttaagtaaatgattatttcacgtaaatgataattatttcccataatgatttactcatgatgatccaaagaataattatttcccataaatgataattataattttcatcgtaaaaaaattaaattaaaattagtttacattatgatatagtgaataagtaatttacaactttttgtaacaaaaataatttttataaattaattataatttttatcnnnnnnnnnnnnnnnnnnnnnnnnnnnnnnnnnnnnnnnnnnnnnnnnnnnnnnnnnnnnnnnnnnnnnnnnnnnnnnnnnnnnnnnnnnnnnnnnnnnnnnnnnnnnnnnnnnnnnnnnnnnnnnnnnnnnnnnnnnnnnnnnnnnnnnnnnnnnnnnnnnnnnnnnnnnnnnnnnnnnnnnnnnnnnnnnnnnnnnnnnnnnnnnnnnnnnnnnnnnnnnnnnnnnnnnnnnnnnnnnnnnnnnnnnnnnnnnnnnnnnnnnnnnnnnnnnnnnnnnnnnnnnnnnnnnnnnnnnnnnnnnnnnnnnnnnnnnnnnnnnnnnnnnnnnnnnnnnnnnnnnnnnnnnnnnnnnnnnnnnnnnnnnnnnnnnnnnnnnnnnnnnnnnnnnnnnnnnnnnnnnnnnnnnnnnnnnnnnnnnnnnnnnnnnnnnnnnnnnnnnnnnnnnnnnnnnnnnnnnnnnnnnnnnnnnnnnnnnnnnnnnnnnnnnnnnnnnnnnnnnnnnnnnnnnnnnnnnnnnnnnnnnnnnnnnnnnnnnnnnnnnnnnnnnnnnnnnnnnnnnnnnnnnnnnnnnnnnnnnnnnnnnnnnnnnnnnnnnnnnnnnnnnnnnnnnnnnnnnnnnnnnnnnnnnnnnnnnnnnnnnnnnnnnnnnnnnnnnnnnnnnnnnnnnnnnnnnnnnnnnnnnnnnnnnnnnnnnnnnnnnnnnnnnnnnnnnnnnnnnnnnnnnnnnnnnnnnnnnnnnnnnnnnnnnnnnnnnnnnnnnnnnnnnnnnnnnnnnnnnnnnnnnnnnnnnnnnnnnnnnnnnnnnnnnnnnnnnnnnnnnnnnnnnnnnnnnnnnnnnnnnnnnnnnnnnnnnnnnnnnnnnnnnnnnnnnnnnnnnnnnnnnnnnnnnnnnnnnnnnnnnnnnnnnnnnnnnnnnnnnnnnnnnnnnnnnnnnnnnnnnnnnnnnnnnnnnnnnnnnnnnnnnnnnnnnnnnnnnnnnnnnnnnnnnnnnnnnnnnnnnnnnnnnnnnnnnnnnnnnnnnnnnnnnnnnnnnnnnnnnnnnnnnnnnnnnnnnnnnnnnnnnnnnnnnnnnnnnnnnnnnnnnnnnnnnnnnnnnnnnnnnnnnnnnnnnnnnnnnnnnnnnnatctttatttattgataaagtaatttaaattaattaattttgattgtcctataacgaaaattcaaattattattttctaataaatatattgactaaatgttattacactgattataataaaaattgaattaaataaaaagagtttaaaaattccaaatcttgattaaatttaaataataaaattataaatatttttatttacaatatagagtgagagcatagaggtaccaattgcaatacaaactattaatttaatatttgattatgctcctcaaaattttagttaagggtcccaagaattcacgttatttggattagtagcctatttgatgcaattgaaggcattttagagagcattggcaagcttatcgtatcatttttataaattaattttaaattgtcacctctatattttattgttattaactcattattttatacaatgaaataaaaaaataacatctttaatattctaaaagaaaactttaaataaagtgattgatgaataataagtaggatcaaataataaaccagccaaaatcattgatattaatgacaaataaaaaaaaaaaaaaaccaaactgattcatagacttaaataaaaagaatatttataatattatcctaaccatccaaatcaaagctacaaatgagataaaataaaacatgcaattcttttttttacacacttggatggcaggacaatgaaaagtaaggacaaataacgtgtatatgaggtgtgtataatattctagagtgtgtatagttttcattggtggaccacatgattgcaaggttttggagttaggcagcagaatggcagaacatcatgcaattaggttgcttttagtgagattcacttcatacaaggaagctggggatgagggacctaaacaaaactcagcaacatccaccaccaactgggaaaaagaaaaggtatttacccttatgaagaataaaagtttcttatatccctcttcaatttccaatcaaacaaaagggcttttttaaaaaaataaaaaatctgtgttaaatattctgttcttaattggtttagccaatagctagaaacaacataggaaaggatatcattaagagccagccattctcacaaaagggcttgttcatcacaattccagtaaaaataatcattaattttgtgtcacaattttccctttctttaaacacttgtacatttaaaataagtttccaaccatacaaagtcccaaaaaatcatatgaaaagattacacaagggaggatgggagaatgttgaaaaataaagacttgcagacaaaacactaagctcaaaataatcatatccagcacatatggggcatgaatttaatagtgaccaacaaacttatagttgacaatcaggtcacatccatcatactaaacaacaaccctgctcggtttgcatgccaccagtccaagacgtactatattttgtcatttccaacacaactttgatcctgctgatagagatcgggtcaaacctggttcaagacatataccaagtcgcattttagttcaaaagtgtgtacttgaaatcagagttatagcatagacattaaacatcaaaataacaacacataataaaactaaaataatgaattccaatctcaagatgcagaatactttataagtaaaaaccatcctccttccctccccctttccactacacagacaaataaagaagaaacacattaaaaattcaacaggttctgaagtagtgcagtttagagagtatagcatgatacaaaccttagagatagcctccaagcagcacctgacttgtcattatgagcgacacctttactattagatgcacttccatagatatcatcaaatccatcatctttggcattatcccatccagcccaaccatcactgctatgggcagctgaccctttagctggtactttcttccttgcatcttccataaaatacttgaaccacaaacagagataaaaaaatacataagtgataaatgttatgattaaggaaaatagtgagtgctgactaaaaaaaatgcagatctttgctacaaagggaacagtggaactcacatagatagatatgtttcatatgtttaatgaataattgaatagcaggatttttttagatttcatagaatattttaaatttttttagcaaaacataggtaatgtaaatttagcaaagctggaaggttaaatccttgaacattaacattatcaacttctgccccccagttatgcatcagtcacagaattgtctgcctgtatggttctctctattctatattgaaggtgagtatattaaccacttgaattttgataatgtgatctgagtttcatcttggttaacagaagtggaactggagcataccttcatcaatgtatactacgtgattcccgtgcttggcactgatttgtggggacatatgagtagcctttaaggctgagatatacaccatattactcttcaataagtaagctgaggctagaacataacagtcatgccaaatatgtaaccagcagcatgaaaacagagggatgattcactatactatcataattataaatattctagggtgttttcttcttctcttgaaaaatgatttttttttattgtgcttttgggagtttctatgaattatctctgatttatgattatttgtgtttatgtattgctgctagagcactagagttatttctgcaagatttgtgtgatcgaacatatgagatgactttgaggaggggggcaaagactatgaatgcttttcatttgtaagtgaagtttctattattttcttggttcaaatttttgtctatgtcaagtcggttcaaggtggttacaaggctgcaggtttctttcttttggagggcggttattactatgtacaattctaatgataatgtgcacagtctcaaacaatttccttcttgtgccttctatttatcacattcacaaacatgattagacatgtaaatgacatctgcagaagaaaatttcgggatggtcttgcttttggaacatgttttttgtttagtgtttaccttcactttccagtttctaaaatgtctgagttacttgcatccttgcctttgcagaaaccagcgtgtgcagacttttaatgtctttgattttctgaaagatattgtatgcaaggttcctgatttaggctgttctgttgcaactggtgatgaccatgctgtcactaagaggaggtctgtgctctggtcaatattcttgttacttggaacaagttttctgtatgctgaactttgtttactttatattaggaaagttgccgatgatgatgataatgacagcgacgaggagctcaagagaaataagaaggtaatttataaactgtattcaattacttcatcagtggttagcttaaatttttcttgtgtgattgaaccttttgctgagtaattatctcttgtccatgcacactgtgaatcttttcctggatacaaaaaaaatttacttcagtcaatagggaaactcactagtggcttgtgaatgcaagtacgtctaaatgtctaatagtctgtgaggctaggccacacttcaacttaaaacttattacacaaagcgccacaactgtctggttttctgaaaacttttgctgaaaactatagaattggcactaaagaacctggcagctgtttaatattaaatattatctgacttctggaactttgttttttttcttcatgatttgcacagccagagcctggatataagagtggcagagggaggggtaggggcagaggtaggggtaggggctgtggaattagacctgtatatcaagaggtgagttcacatgccaagtgggaagatgattctgatgaattgaagcaaaatgacaaccacactcaaagcaatgaaagcatggaaaatgtgccagaacctgaagtagttaagcaaagttttccagtgagcaaaccggcttaagtgtccattcgaaattttgacttaaatttggacccagatgaggatatggattcattagacaccccaacttctgtcccaatgatgtgttgctaacacatcttagatttaggctaattttaggttataatttaattgaataagtaggaatataggttagaattagcttagttgttatttacattcaatttgatctcatttctttaccaaggtataatttcagggctaaaaaggaggagaatcaagccaaagaagaagaaaaatcaagatgaaggtctcgcgcggttcgcgccaagcttcgcgcgaatcgcgccacaatgaaaatatcaagcctcaagttcgaacaagtcgcgcggatagcgccatgtctcgcgcgattcgcgtcaaaggcccaggatcaaccatgcatctcgaaccatccacgcgatcagcgtggattgccacgcgattagcgtcatgaagccgaatgatccacgctatcagcgtgaagtctcgcgccactagcgccagaaggtctgaagacaacctccaactcgtgccatccgcgcgaccagcgcggaatcccgcgcgatccgtgatgcgaagacgctgtttccttatttgaaaagatttggttcgaaaattgggaagaaaaggggcttctgttactagaattaaaccatcttgaaggcaattataaaaggaggcctctgaactgaagaagatcatcatctatcatcttttgatcattctacacctttggaaatcattcctacatagaatcagaagctagggtttgctgcagaagaatgtttcagttgacagctttggtgttcctgatgactatgtcaggctaaactctgtattgtggttaggccaagaaccaatatgaactcctttgtaatttgactggtattgaatgagattactatgattgctttattttctctgttcttcattgttatattctttcttagaattggtcattctatttaagttctgagggttagaattcgcaatagggatgttgggattctaatttctgacatgagtaagataacaattgttcattgcctagggataggaatgcgtgattgcagaactttataatatattcttttaaatgcttagcttgatagaaatcactaaggaattagggttttgattcaggttaaagggttaattcgctaagggattagggattagctaaattagaaaagatttattctctgattaatcagaagcaatcaactttgataaccagttaagtgaaagaggcaggaatcaaaggggattgcgtcctaatcacaattattcttccattggtttacaactcactctacttgcattttaattcgttttaatttctgtcaattacttaattgttcaactctcaacacaacaaacaattctttcaaaaatcgtttcttttcccttccaattgcttagactgcaaattattgtgaaatcagtatcaatttctgtggatacgatactctacttacctactctattacttgaaacgagcgatatacttgccgttttcgcaacacccaactagttcatctgcaaaatcagtgtcagaagagaagcatgaggaataccctggatggtccttgtctgaaatggaaaaaatgaccattgatcccattcaactagcgaacataaatggaaggattgatgaagatgaagaggattatgatgaagaaatgtagatgaacctgtgtcggtttattaattacttctcatatcagcctcaaatctcagatgattttgttatttcctcctattcaggtatgcctaatgcagaagatttattgaaagacaacacagtagtagacaagacaaaagtcggaattggtagtccagaccaccatcagtacattgaaggagaggaggatgacgaggttatgttttcaaacctatagtagctgagaaacaagctgatgtggttgtttcctcatcacgggcaccccatgaaggcttagaatcagcttcaacagcttctattggggatataaaatttaattttaattcttcttctaaccctctgaatgatgtgaatcatcaaatttctttacctgcttctgttagtgctatggtgcctcaacacctgcaaccagttcagccacattcttcaaggtggtggttagaggaggaaatatctcttgctaacagtttgaaaggtcttagattcttggagaatgggcacgtgatgaaacctgacttaccatttaaagcagctgcggcaatctctgactatgctgcacttgcagttcctacccagcaatctgtaagtgctagtactagtatgttttatgctcatgatctctcaaaagctgaagactttgcaatatcatccaaaattgaggccattgcatcttctggaacattcactgataactctgttgtgaaaacatcatcaaccttgcaagctggtttgaaaaaatctccagtcagccgaccttctaggcaacttggtcctcctcctggtttcagtcctgttcctcctaaacaatgtagtgaacccactgtttcagattcgattagtgggaatccattatggatgattacagttggttggatggatatcagttgcctgcatcaaccaatggtttaggccctaatggtcctcgtactctcagtcaaattctcatcaagttggtaacaatggtttgagtgggacagccagttttcccttgcctggaaaacaaattccatctacactgcaggtggagaaacagaatggttggcaagattttcagacttcggagcttttaaaagcacaccataatcagcagttgcagtcacagttgctcccaaatggaaatcagcattttactccactgcctgatcaatttcaaggacaatcaatctggacaggtcaatacttcgtgtgatgctgctcgtcagtatgagaatattgatggtacgcttcccatctggatttattggtagggctattcataaactgctgattatatttcagatttgattttgaaaacttacccaattcaaactgaaattacacacacacatattattttaaaatttatgatagtactcatggttacattttcatttcttatattttttttaaaaattatcacataacttaatacttatttatgaaaaatgtttaattaaagataaaaaattatttacttgagaaaaggttgttaaacaagatataatggagtgagatatagattgacggacggtatgttttaggatggagtggagaaaagttataagcttggtggagggttaaactcattagtagttctatgtttccgtagttcccttatttttgttatctttttcttcattttttttcctcttccttcctttcactagtcttttattttagcttatttttttctctgttttgtcttatttctacttttttcttcccctctcccttttctctttctttgtcttatttccgatttatcattgggtttatccagcaccgaccccaattaacttgggttaaaggtgttgttgatgttaatgttaatgtttaattaaagataaatatgtagtaactatgtgagtactgaccaaaggtatttaaatataattattaagctgtgtaaatttatttttaatagtatatatttgaagagttatactactattagctatacattgacttatagatgagatatttgatattttaaattattttttattatatttattatgtgttactatttaaaaaatgaaagctaattcgatccaaactgccttatagattggattggaatcatttggttgaatttaaattttaaaccaatctaattgaatgataaattaagaaaactgaagtaactggactggataatattgctgtttctttgaaggatgcctttcattttgttaattttttggattgctaacataattacatatttgaggtcctcgaaggattattacaactaccccttcaaactccaactctactgccttgtcattgaattttgttggagtttatctggcctagacatgttgcaggaggttgctactacaaaaaggtgggtaccaaattttttactttactcattatgtttaaaactcgcaaaaattgaaatttggacaatttgtgtgccacacgtatccacctcctctactaccatcttcataaacagttttgggatctactaggattcatggctgtatgttctgaactgtttatcggtcattatgtgttaactgctgaacttaatcttacataatttgcttgtatattattttagaatttgctgagctctcaagtccgggtgatcgaagataaacaagcatctttagggtggatagagggtgataaataaaatctagtcatcttggagcttgtatgtatcttctaagattggtggtatggctatggtttgttcacttctccagtggaaatgtcataatggtttgccatgcgcctgtaagaattgttaccgtcatctagctgccggtgatacatgatgctagcccctttttttactacctcaaagcttaagactagttgggaagattggtaggtatgaagctcgtttaagttggataatgggatatgataatgactttgtgaagcatgcttgagtaagcacaagtgtctagtggtcgcatctttgttaagattcttatgtgtttatataaccagtgatatatacatacggtttactttctcccttaaaagcttttacctagtcgggttttactctaacttatgaataagtaatccttgttggatggtggattgtggatatgtcttggtctatataggaaatatatctatctaaagtagggatttgattgtctctatttactgctgctgtgatttattgcttttgttgttcagaagtagcatgcagcagttacttacatgcaattcctttgtgttactgtttgtctttagtttaacaagaaataacagaaggtagatggaaagagttagactcatttatcctaatatgaacaaaatacaataaatatttaaacttgcgagaaaatgtctgtcttctcttcctgagaggggttgggaatggtagtagcttagcctgttcatcctctgagatcatcagacatttcgtttggaatttcatcatgtcgaagcgtaccaggtctttgaacctacaactgccaaagtaattgcattaaagatattatctttcaggaagacatatattaaaaagggtagatggtattggattggaattttgagtcacccaagagacagtgatgctttcaagcaagtaaatattttttgataccataactaacaaccttaaatatgcaagattacctatctctacctacattatataacttattttacctattttacagacaactagcaactacttactactttaagttgtgatcaaattatgatggtataactttgctaattatataaaattaagactctttttaaataaacttatccaagaacacttatacccaacctttttagatataattttaccgacaaaaaaaaggaaaaaaatatgaaggtaaaacaaatttagcttttttataagttaaaacaacttatacatataaacttttggagaagtcagatgaggtaccttctagaaaagtcaggtacacaagttaaaactaattcatttattctctatttttttcctatagtatctataatgaaataaaaaaaaaattgtattctaggatgaaggtgaacaatcaccaaaaaaaactctcgtatattcaccaatcttggacaactctctggtcagtaatttttcatttattttaaaagaaacaaaaataataataccatatttgtgtatatactatttccaagttatatccgttggtaccggacaatcacacaataatcaaaaaaaacagaaagagaaaaagaaaaaataacacacaatgtctatcctgattcacccaatgtggattacgtccaatttttctctatattttcctcgtacactcattacaatgcacttaaattacaaggaaatatatagtttagagtaggaccccgtccaagaacgacttatcttcttacggcaaagtatgagtcatacccaacaatatcttatatgcaaaacaacaaaaatgagacacatagaaaatagaatgtgtaattattattgttttcttaagggagagataagatatttttttttaaggaaaaaatattatcgaaaatgaaaaatgatgaataccattatgatatttaaatattattttgatttttttaaagggaaaaatattatttcaaatgaatctatttaataaagatagagatatttattattttgattagaagtgaatctattaatttaaatgaggaatttatttggaagaatcattaataataagtattaatctaaattagataaaattaagtcattaattattcttgtgtgcaacaatgcaatgttgcatacattaaaaaaaattgaataataaatattatttgatttcaaaataatttacactatctatttttatttatttttttgtcctgagtcaagaaccatgaatgtttcgtaatccaatgaattaaaagctaatttcgttcgtggtgcatgattattgctaaccaaaaaaaatttcgcatgaaaaaaatcgattacaaattctccctccattccaaaatgaatgaagttttcacatataatttttttatattaactgatatgttcagtttccaacaaaatattaaaacttctattctaaatttgtcataaataaatgacattaatctcatacatttttagaatcttgcttgtacctcaccataatggtacaaactccttccattaaagtcacacttctttttccttatcctttttttttattactacaccgcctatgcagttgaagggtttatgcaaatattggtgcttttaactagtagagaaacattagtgaggagaggcaaagactagtttcatccacaaaagctgggggaaaacaaaacggataagatgtgattccattggttgaactatgacaacaagcagtttgcaaacagtgtaaggtcttgtatatgtttgaatgcaaaaaaatttaccggccattaaaaagaaagaaaaaaaataaaaactattttcagagaaagcacgaaacatcatttgtatttatcacaattcctatttgcttaaacttatctattttgacatgtatttgtagtcctcatctcaaaatcactggctttatggtttatcatctttccctcagcttttatttaatgaatcccattcaggtatgtttgcagtagcctcattgaccatttttacaagccgcacctgaaaatgattattgcagtatctattaattgacaaaaactagcaatcattgaagcacaaaatggcattaatgaagcttcagttaaaacacctctagtatgaaggtttagcaaagactatgtaaaatcacatcaaaaccccaccaaacacttacaaccaatctttcccattcaactgattttccattgggctcagccattgaggtccagtggtccaccaaatgctataatagatgccacaaaaacaaggctaattctaataccttgtggcttgtactaatggcataacatgacatcaatgggcataggcaacaaaaaaaaaaaaaaaactcgacataagcaacaacaaaattgcagctattccatagatcttcacaagtaaaattttggagaaacaacagccacattatcaatcatgattcatcctcatcaaaaaatagattccctaccgaaaatactcagttgatttcctgtgtatatatttgcatcctgatttcctgtgtatatatttgcatcctatgtgtttgattcggttttgcagtggtaatttgctgaagtaaatttaattatttgaagcactttgcgtgcaaaagttagaatgatatggtccataaggaagcagggggcaatggcatgcacttcaatatatcgggtttactacctttgcaattgttgccacaaactaaagttacatataatgaaccttttctttatatagccatctgtcagaaagatgaaccatcgtaaaattctttactaaattaacatgcaaaatcaacattctaaaatttaaattcagatataatgagatgaactttttatctaattatgggttaataaagcaaagcaaaaagttaaaataatggagactgaaatagaaaggtaagtgtgaaagataagtagaatgcaccaaaactcctccttttggagtatttaaaaacacaaatgacatgagaaaataggattggtcaatagtgttaaggacattttctaatatagactgtttggcaaaattgcaactttccaacatcaactgattaataatttcaaagcaagacacctagaaaatttgaagcatggacttaccacgctttcaggaactcctggaggtggtaaggggaggtttttgggtggaggacccaaaagataagatctcttgtcaaaacgccattctccaatcttcccatatgtcagttccccctggatgaagtaataaggagtagataacttacgcacatacaacaactaagcatgcaagactcacattttatacaaggacaggcataagctaaactgcaaaagtaatactaaccacagaaatataggttctctaccttactttcacatcattcttgcattaaggagaatgaactcaccttcatattatagtcacatccatatgtatagtggatgataaacttattctcgacatttaagtcccaaggtggctgaaacattccaatgatgcatgtcatggacttgtgtatgaattccttaagtaacaattacaaaacaatgcaagcaattcaaacctgaagcataaagtcttttcgaagattatgctttacaccatgcaatgcagatgccacagcataagcatacctttactcaacagagaatcaaagcagcagaaggttagacctattagtacagaccagggtccaggaaaagttataaaatgaaaagaatatcaataaatgataaacaataaaaaatgaagcccccnnnnnnnnnnnnnnnnnnnnnnnnnnnnnnnnnnnnnnnnnnnnnnnnnnnnnnnnnnnnnnnnnnnnnnnnnnnnnnnnnnnnnnnnnnnnnnnnnnnnnnnnnnnnnnnnnnnnnnnnnnnnnnnnnnnnnnnnnnnnnnnnnnnnnnnnnnnnnnnnnnnnnnnnnnnnnnnnnnnnnnnnnnnnnnnnnnnnnnnnnnnnnnnnnnnnnnnnnnnnnnnnnnnnnnnnnnnnnnnnnnnnnnnnnnnnnnnnnnnnnnnnnnnnnnnnnnnnnnnnnnnnnnnnnnnnnnnnnnnnnnnnnnnnnnnnnnnnnnngggagctatttcctccagcaaagactgatgataaagaaaattcaatgccttaaatgaaagaatatgttgcttatgggaaaatcacgaaaatctgatcatagttataacagtaaccattacagctataaaggccacagtataacaactataaccaatcaagcacagtatgcaaactattgagacttaccttcttaatgattacaggagaattgccaattggatcaacatcagtaacaggacccttttcctcaggatagaatttcctgattattttttcattctcaaatggttttatatagaaaaatggaaatgctgcgggcagggttccatgagccaaattaggcaaaggatttacaaatatgtggtcaggttctgccatcagaatatatctgcaccaatcataaaatgcgctgcctcttagatttcattattggagagcataaaaattgtagaaaaccataattaaggcacttactcttcctcaatatctgctttctccagccactgaacaaaagcccatggtctatttaggacaatataaccctgcaccaaaaataaatggacataaattttgatgacagaatgaattgatgggaataatatagaaagatcacaaacaatgacattcatgaaagagttgataactatcaacagtgtagaacgtgttaagtcaacaaacatgccactggacaacatgactgcaaccaaatatgaacccaaatctaggttatcgaaactcattgctcaaaagcagcttatttgggcatacacttattgagacttgtgagttcacatactaatctcagttatgagagttccccttggctgcaaaacttcaacaaatactaccgatacacatttgacaatttggaatatacacacagtaagatgcacagtaaacggaaaaatactcactcttttgctctaacattaccttgcttagaaaaaaaatatcagttaccaaggaagagagacagtagaaaatcaaaatcactaagatattgtctgtgttactagttaggcatacaagggagacaaggatggaaacagattatttcagaaataaagaagcaaaataactgcaacagttcctatttcatctctattccctgttttatctgcatgcataaaccttcattatttgacatggacaatacgatatgcaaggctaatgaaatgtagagcccaccaaggttcatataatgacatgtggtaaagtggatcatatagtcttttatagatgtacattaaaaacaattaatatgtaacttaaacattgcactatggacgagtccccagaggcttttgcttttttctcaaaccaagatgatgctatgttatggatgtgattataccataaatgctcaaaaaatagctgcatattaacatattatctttctgcacttcagtttctgttgtccccacaccacagaaccatttttttgcatcagaccttaaacagtagcaacaaaatacttcgatataaaatcagttgtgtcaatcaccatcagcaataaaaagattaattaggtgacaagaagaaaaaaataatggaaatgacttttcaaatccaaaaaactggcagcaacaacaatcattagtaccactacattataaggcagaccaaatgcagaacaccaaatagttaaaataaccagggccataatagtcgaagaaacatgcaagatattcaaacaaaaccatcatataaaccaatcccatttccctctaaacacatctcattgcatttgcatcaagtgaagagaaatttcctccctttagaaaaataaactcttattatgtatgatgaggagaacatacgccatggtaacaaataacgatcattctgtgaattcttttagacaacatatttcacaattaagtagcaacaacaaattaaaatttaaaacatattacttcaaccaaacaatcatccccatttcccccaccccaaagttgtgaaaggtggcttactctgtatgtcaggatttgtaaatttgctatagggtcagaaattcaccaaaaaaaaaaacgcaagtttaaacgggctaaaaagatacaaattctgcagggagtaacagaaaaacatttaccttatccaagcccccaggaagtggatcaaccacaaaactaggaatctcatccatcagctggtctgaccttccagagtgcaaaatacgcgtgaacttccccatgtcggatccaggcatgtccttcactttcttataccaatagtacataatccggcattgccattgattgtaagcagcatcggttgccgtcatggcaacatgaaactttgaattagtcttttctgacctcataatttttctattaaaagattccaacccatctgccttatggtccatgatcatagctaccaaattataagtggcaaaggaaaaaagaagcaccatgagcagcaaaagcagtgactttacccgccccatgctttttctcacaaccattttcaatatcttcacctattcaaatatgaattctcagaaacccccagaaaccaacccttttaaacccccactcaaaccactttagtccttcaaactcacaactttagtgcatagcaatagccaacagacacaaacacaatcctttaaccgtttgcttcacacacaaaaaaacctgcatcataacataaagtagttaatgtgccacgtaactgcaaccaatgaaataataataataaaaaaaaaaacaaacaataaaaaccactacataaaaccccagaatctaaaacgcataaaaggtgaaaacgcatgcttgaacatgaatgaaggaagactcacgtaaacagatctgaacttgcacggcaattcagggctccccaaatggggaagactcaaactttgaatgagagaagatgcaaaagaatgaaactttggaggaaaaaaggtaaaggggtggatgtggaaaagggatttgtgtgtgtgtgtgtgtgtgtgtgtgtgggggnnnnnnnnnnnnnnnnnnnnnnnnnnnnnnnnnnnnnnnnnnnnnnnnnnnnnnnnnnnnnnnnnnnnnnnnnnnnnnnnnnnnnnnnnnnnnnnnnnnnnnnnnnnnnnnnnnnnnnnnnnnnnnnnnnnnnnnnnnnnnnnnnnnnnnnnnnnnnnnnnnnnnnnnnnnnnnnnnnnnnnnnnnnnnnnnnnnnnnnnnnnnnnnnnnnnnnnnnnnnnnnnnnnnnnnnnnnnnnnnnnnnnnnnnnnnnnnnnnnnnnnnnnnnnnnnnnnnnnnnnnnnnnnnnnnnnnnnnnnnnnnnnnnnnnnnnnnnnnnnnnnnnnnnnnnnnnnnnnnnnnnnnnnnnnnnnnnnnnnnnnnnnnnnnnnnnnnnnnnnnnnnnnnnnnnnnnnnnnnnnnnnnnnnnnnnnnnnnnnnnnnnnnnnnnnnnnnnnnnnnnnnnnnnnnnnnnnnnnnnnnnnnnnnnnnnnnnnnnnnnnnnnnnnnnnnnnnnnnnnnnnnnnnnnnnnnnnnnnnnnnnnnnnnnnnnnnnnnnnnnnnnnnnnnnnnnnnnnnnnnnnnnnnnnnnnnnnnnnnnnnnnnnnnnnnnnnnnnnnnnnnnnnnnnnnnnnnnnnnnnnnnnnnnnnnnnnnnnnnnnnnnnnnnnnnnnnnnnnnnnnnnnnnnnnnnnnnnnnnnnnnnnnnnnnnnnnnnnnnnnnnnnnnnnnnnnnnnnnnnnnnnnnnnnnnnnnnnnnnnnnnnnnnnnnnnnnnnnnnnnnnnnnnnnnnnnnnnnnnnnnnnnnnnnnnnnnnnnnnnnnnnnnnnnnnnnnnngggttgacttttcaataacgggtgtaagtagcaaggaaggcactagaaaacgcggaggtttgaaggtggaagagactgagatgatgaatctgagtgtgtattgtatctgttgactccaaaatggaaataaaatgaaaaggaaaaaaaaaatgagagtgaaagggatgatatatgatgatggtgcggttagtgcacaacaccaaaacgaaaaggaaagaagaagaaaagtgaagaaagctttaagaaaggctgttcatggggatgcattggacgcaaatcccggtttcagacacattctaattagcctccatctcaatgaatattcatgcacaaggccactccaaaatccaaatccaaagagatgcacttgccatccacagggcatgtccttttctatcaatgttgcttttccttttgttttagtgaataataaatatattttttgtcctcgtacaattaaaaaattgttcagatttggtcctcatttaggttcgtatggcaaagtttgataactctaatttattgtgctctattttttttattattgcaagtgacttttcatatgaaaagaaatgtttttttccttggggataccccttgtattagatattagagtatcaaactcactcgatcataaatcttacttatagtatataatttttgttgattcaaagagattttgacacacaaaaataattaaaaataaatttttttaataaatatattgtttctcgcatgtgaatgcaaggacaaatctacttggtaactcaaggatcttattcaaccgattttcatcaaaattataaaaataatatataagttctgatttgttgaataatgaatttccatttttgttttaaccttattaaatattagtttattgataagtaattaagggattgaacataaataattttttattaaagttaaaattaaatcgtttaaataatatttaaatatgatctttaataaaaaaaattattagattttatttatctcttgattaaattttaggttaatcataatttttttatgaatgaatcggtggttaatggttaagaagaaaaaaaatcctttgatgggttgcgtgtggctcttttttttgttgaagatccttttgtgaactgtgtgtgacgctttttttgttttttttgttcaatatgggaatacactatatgtagtatattataagtttaaatgtatattaattgaatatagaaatccactatatgtccgtagtatattattaactgaaaatnnnnnnnnnnnnnnnnnnnnnnnnnnnnnnnnnnnnnnnnnnnnnnnnnnnnnnnnnnnnnnnnnnnnnnnnnnnnnnnnnnnnnnnnnnnnnnnnnnnnnnnnnnnnnnnnnnnnnnnnnnnnnnnnnnnnnnnnnnnnnnnnnnnnnnnnnnnnnnnnnnnnnnnnnnnnnnnnnnnnnnnnnnnnnnnnnnnnnnnnnnnnnnnnnnnnnnnnnnnnnnnnnnnnnnnnnnnnnnnnnnnnnnnnnnnnnnnnnnnnnnnnnnnnnnnnnnnnnnnnnnnnnnnnnnnnnnnnnnnnnnnnnnnnnnnnnnnnnnnnnnnnnnnnnnnnnnnnnnnnnnnnnnnnnnnnnnnnnnnnnnnnnnnnnnnnnnnnnnnnnnnnnnnnnnnnnnnnnnnnnnnnnnnnnnnnnnnnnnnnnnnnnnnnnnnnnnnnnnnnnnnnnnnnnnnnnnnnnnnnnnnnnnnnnnnnnnnnnnnnnnnnnnnnnnnnnnnnnnnnnnnnnnnnnnnnnnnnnnnnnnnnnnnnnnnnnnnnnnnnnnnnnnnnnnnnnnnnnnnnnnnnnnnnnnnnnnnnnnnnnnnnnnnnnnnnnnnnnnnnnnnnnnnnnnnnnnnnnnnnnnnnnnnnnnnnnnnnnnnnnnnnnnnnnnnnnnnnnnnnnnnnnnnnnnnnnnnnnnnnnnnnnnnnnnnnnnnnnnnnnnnnnnnnnnnnnnnnnnnnnnnnnnnnnnnnnnnnnnnnnnnnnnnnnnnnnnnnnnnnnnnnnnnnnnnnnnnnnnnnnnnnnnnnnnnnnnnnnnnnnnnnnnnnnnnnnnnnnnnnnnnnnnnnnnnnnnnnnnnnnnnnnnnnnnnnnnnnnnnnnnnnnnnnnnnnnnnnnnnnnnnnnnnnnnnnnnnnnnnnnnnnnnnnnnnnnnnnnnnnnnnnnnnnnnnnnnnnnnnnnnnnnnnnnnnnnnnnnnnnnnnnnnnnnnnnnnnnnnnnnnnnnnnnnnnnnnnnnnnnnnnnnnnnnnnnnnnnnnnnnnnnnnnnnnnnnnnnnnnnnnnnnnnnnnnnnnnnnnnnnnnnnnnnnnnnnnnnnnnnnnnnnnnnnnnnnnnnnnnnnnnnnnnnnnnnnnnnnnnnnnnnnnnnnnnnnnnnnnnnnnnnnnnnnnnnnnnnnnnnnnnnnnnnnnnnnnnnnnnnnnnnnnnnnnnnnnnnnnnnnnnnnnnnnnnnnnnnnnnnnnnnnnnnnnnnnnnnnnnnnnnnnnnnnnnnnnnnnnnnnnnnnnnnnnnnnnnnnnnnnnnnnnnnnnnnnnnnnnnnnnnnnnnnnnnnnnnnnnnnnnnnnnnnnnnnnnnnnnnnnnnnnnnnnnnnnnnnnnnnnnnnnnnnnnnnnnnnnnnnnnnnnnnnnnnnnnnnnnnnnnnnnnnnnnnnnnnnnnnnnnnnnnnnnnnnnnnnnnnnnnnnnnnnnnnnnnnnnnnnnnnnnnnnnnnnnnnnnnnnnnnnnnnnnnnnnnnnnnnnnnnnnnnnnnnnnnnnnnnnnnnnnnnnnnnnnnnnnnnnnnnnnnnnnnnnnnnnnnnnnnnnnnnnnnnnnnnnnnnnnnnnnnnnnnnnnnnnnnnnnnnnnnnnnnnnnnnnnnnnnnnnnnnnnnnnnnnnnnnnnnnnnnnnnnnnnnnnnnnnnnnnnnnnnnnnnnnnnnnnnnnnnnnnnnnnnnnnnnnnnnnnnnnnnnnnnnnnnnnnnnnnnnnnnnnnnnnnnnnnnnnnnnnnnnnnnnnnnnnnnnnnnnnnnnnnnnnnnnnnnnnnnnnnnnnnnnnnnnnnnnnnnnnnnnnnnnnnnnnnnnnnnnnnnnnnnnnnnnnnnnnnnnnnnnnnnnnnnnnnnnnnnnnnnnnnnnnnnnnnnnnnnnnnnnnnnnnnnnnnnnnnnnnnnnnnnnnnnnnnnnnnnnnnnnnnnnnnnnnnnnnnnnnnnnnnnnnnnnnnnnnnnnnnnnnnnnnnnnnnnnnnnnnnnnnnnnnnnnnnnnnnnnnnnnnnnnnnnnnnnnnnnnnnnnnnnnnnnnnnnnnnnnnnnnnnnnnnnnnnnnnnnnnnnnnnnnnnnnnnnnnnnnnnnnnnnnnnnnnnnnnnnnnnnnnnnnnnnnnnnnnnnnnnnnnnnnnnnnnnnnnnnnnnnnnnnnnnnnnnnnnnnnnnnnnnnnnnnnnnnnnnnnnnnnnnnnnnnnnnnnnnnnnnnnnnnnnnnnnnnnnnnnnnnnnnnnnnnnnnnnnnnnnnnnnnnnnnnnnnnnnnnnnnnnnnnnnnnnnnnnnnnnnnnnnnnnnnnnnnnnnnnnnnnnnnnnnnnnnnnnnnnnnnnnnnnnnnnnnnnnnnnnnnnnnnnnnnnnnnnnnnnnnnnnnnnnnnnnnnnnnnnnnnnnnnnnnnnnnnnnnnnnnnnnnnnnnnnnnnnnnnnnnnnnnnnnnnnnnnnnnnnnnnnnnnnnnnnnnnnnnnnnnnnnnnnnnnnnnnnnnnnnnnnnnnnnnnnnnnnnnnnnnnnnnnnnnnnnnnnnnnnnnnnnnnnnnnnnnnnnnnnnnnnnnnnnnnnnnnnnnnnnnnnnnnnnnnnnnnnnnnnnnnnnnnnnnnnnnnnnnnnnnnnnnnnnnnnnnnnnnnnnnnnnnnnnnnnnnnnnnnnnnnnnnnnnnnnnnnnnnnnnnnnnnnnnnnnnnnnnnnnnnnnnnnnnnnnnnnnnnnnnnnnnncaactaaatatacattcaatacaacctcttagtttgtttctatacttgctctagtacgacttatttatatgattatttacttaaaaataaataatagataatatgaaatagaaccaaacaattggactatagaaccaacaataagagacatttttaaatatttttttaaaaataaaatgatagtaaatgaaatgaaattttaaaaataataatttaatatttaatgattttttttacagtatatcatttttaaatttagagaaattattaagtgcacctggagcaagatattttattgctctgatccattcattgttcactatgtcagcaatctacctagaaaaattaaaaattgtcattaatttaggaaacaacaatgacccacaatgctgatatggcgaacaatgaatggatcagagcaacaaaaatatcttgatccaggtgcactaagaatttctcttaaatttattttaaaattgaatgtaatgcaatgtaagtaatttgatgtaatattacctcatgtttaaattataataatttttttagagaccatatatatcatttatgataggaccactctgtgcaataaaatacctccaaatacgtaatgcagttgcataacacacaccataagtgttgtaagtcagttagattctaggttcaattatatttttggttcctatataatttttaatatgtaatttttgcctctgaatttttaatctannnnnnnnnnnnnnnnnnnnnnnnnnnnnnnnnnnnnnnnnnnnnnnnnnnnnnnnnnnnnnnnnnnnnnnnnnnnnnnnnnnnnnnnnnnnnnnnnnnnnnnnnnnnnnnnnnnnnnnnnnnnnnnnnnnnnnnnnnnnnnnnnnnnnnnnnnnnnnnnnnnnnnnnnnnnnnnnnnnnnnnnnnnnnnnnnnnnnnnnnnnnnnnnnnnnnnnnnnnnnnnnnnnnnnnnnnnnnnnnnnnnnnnnnnnnnnnnnnnnnnnnnnnnnnnnnnnnnnnnnnnnnnnnnnnnnnnnnnnnnnnnnnnnnnnnnnnnnnnnnnnnnnnnnnnnnnnnnnnnnnnnnnnnnnnnnnnnnnnnnnnnnnnnnnnnnnnnnnnnnnnnnnnnnnnnnnnnnnnnnnnnnnnnnnnnnnnnnnnnnnnnnnnnnnnnnnnnnnnnnnnnnnnnnnnnnnnnnnnnnnnnnnnnnnnnnnnnnnnnnnnnnnnnnnnnnnnnnnnnnnnnnnnnnnnnnnnnnnnnnnnnnnnnnnnnnnnnnnnnnnnnnnnnnnnnnnnnnnnnnnnnnnnnnnnnnnnnnnnnnnnnnnnnnnnnnnnnnnnnnnnnnnnnnnnnnnnnnnnnnnnnnnnnnnnnnnnnnnnnnnnnnnnnnnnnnnnnnnnnnnnnnnnnnnnnnnnnnnnnnnnnnnnnnnnnnnnnnnnnnnnnnnnnnnnnnnnnnnnnnnnnnnnnnnnnnnnnnnnnnnnnnnnnnnnnnnnnnnnnnnnnnnnnnnnnnnnnnnnnnnnnnnnnnnnnnnnnnnnnnnnnnnnnnnnnnnnnnnnnnnnnnnnnnnnnnnnnnnnnnnnnnnnnnnnnnnnnnnnnnnnnnnnnnnnnnnnnnnnnnnnnnnnnnnnnnnnnnnnnnnnnnnnnnnnnnnnnnnnnnnnnnnnnnnnnnnnnnnnnnnnnnnnnnnnnnnnnnnnnnnnnnnnnnnnnnnnnnnnnnnnnnnnnnnnnnnnnnnnnnnnnnnnnnnnnnnnnnnnnnnnnnnnnnnnnnnnnnnnnnnnnnnnnnnnnnnnnnnnnnnnnnnnnnnnnnnnnnnnnnnnnnnnnnnnnnaaaaaaaaaaaaccccttgtaacgggtaaaaaaccaaacaacaaactgctaaataaaacgctagcaccaaacatcctcatgcttataaagaccagacaacacaaaaaggcttgttaaccaaaaaatttaaccacaccctcactaaacaataaactaaatttggaactgccttggtaccaataaatcctgatacatagagctattcaaaatcaaatcaaattgtttataaattatcaaactgatccacttaaattaaaaaattataaaaataaaaaaattcaaaaaatcacatttttttacgatttaattctgatttaatttaaattttgttataaaaaatccaatccaaccgaacaaactccacattatgatccagaaactcatattttatattttgttaggatgactttttgtctctgatacccatgtacacacatattcattcacattggcgtcctctgctttcgtaattgaactcaaaagcggatacaaattgtgccttaaaagttaaaacaacttcagtatacatttaaaaatgaattctgataaaagataaaacttatattgcttattgtctgtctgatcatgtgtcacaccttaaccagtgtgtagtcaatcatccctccttcctatttgtgtcccatctgcatatccacttcagacccggctttgataatactcgtgccagcagcaatatgattaatttgctcaacaaaaatgcataaaacaaataaagcaactgaaccaaaagtgttggaaccaagcttattgttgcagatcctgtacaagtcttcgcttttatcaccaagaaccatgagtaccacaaggtggtgcaaaccatcaccaatccatatgttcaacctattgtgaatagtacttacgctaatcgttacgtgacagatgcgaacctacaattaacttatttaacagcagacaaatgcacctccttattttaaataaaattgtatagatttatcttgaaattttatattttactctccttatcttatatatttaaacctctaacctgtttttatttgagaataaataatgcatttccttattttaataaaattatatgtatttattttgaaattttatttatatctcttatttttacatgtttaaactcagttttattttttcactacacttatatgtttaatatttatttatttattcatgtatatgatgatgattattattaaatttatttttaaaaattgattgctctcactaggctcaggtcttagattcaccaacaatagttctaatcatcctgatttgaatgatttctctgctggaggttcaacctcatttccgattaatgtccaatcccttgctacccattctactcctacaaatgtgctatattggaacaacctgaccaattagggtgataattaccagggaaggataaaaaaataaaaagactttttgagtcttcaaaataaaacaaaggacttattctctatgctttttacttatgtatttgtgtgcctttaggcaagaagtaataatacaaacaggatttttatgagatttaatcttgtagttttttttaatgatatttttataactcttaactgagggagcttaggtggcctagatgtgactctctttattaaaaattcttcctaactagtttattttgtcattaagttgtggataatctctatagctaatgtgtttgttggtcgtgctcttaaatcgcatttgacactgtaatctcgttgcctccgcttctgcttcatccaaaaagttcaagatatacattaattataattttgaaattaaattaatttgtagttcgaaatttgataaattaatctggtgtaatattttatatttattttaatagtgttgaccatgtaaggggataagcacactgaccaacccacagagatgagatgaatatgtggaagaaaagataaaggtataaaaaagagagaacatgtgacaaatgacatgatgctgaaagaagaaagagatgagaataaatgggggtgaaaaatgagatggaggaggaaattaataaatatatttttataagaaagagacattagaaagactagactataaacttgtattaactggtcaaaatttattgcatcacaataattcttagatggagtttgaattgaccaaaaggaattgaataaagaaaaagaaatgtttaacatacaggagaaaatatgtgacacccacattctattaattacaatttgttagatataatatttttaattaaataactagaaataaaaaatcctttctctcaccctcatccacatcaccattgttagatttcacacaacacatagtatcttttggccacatctgaatcagtagaaaggccattaggaacaactttgatcttgttagcaaatttatggttttggaaatcgcttctccgtcttgttgatccatttaagaacatgatttccctttgggatggaaaggaaaatttcaaatttgtgaaattgggaatggactgggggaacctcacgaagagaagaggggatttgtaaaatttgttggattgggattatattaggtggtgatataatgagaagagagcgcaatgcaaaaaaaataaaaaaaaatagggaaatagagggatgtgtttaactgaagagacgtgaacgagtttgttgataaattttggggagatggttatggggattcaatattgacggaaactattttacatcggttaaaattttatttgattatttttttttacttacttataaaaaaatctactttgcattttttaatattggttcttgtatcaccaacattaaaatgactaagtaaaattcctttcccggggaaggagggatatttgtttaatttccttaaaattaataataaatattttttgaaaatcattatttattaaataattatttataagaagttaaataacagtataaaaaaacaattcaacaatttaatacatttttggatccattccttcctccaatttgtatagtttgagattttgaccaaccaaaattaattaacctaaatacaaggtctgccttaaaaatgatcaagcatattattatatgtaagcctttttttttatataaacaaagtttattgaatgtgaatacaagctagaagtactcaaatcttgcaaaagattttcagcaattacaactaattaaaaggtataatcaaataaacctttgtaccataagatccatccgagccctagtaagcaataacaaactcaccaatatagccaatgtttagaaatctgttggccagcctctgaaagtacgttaaacccaaagtatatatatcaaattaagatccttttgcaaaggtccgatcaagaagctgcaaacagaaacctaaacatgcccatataccttctcaagagagcctcattagaaattgatttccacgtacagaaatgctaaaccagcgaatataaccacacgaaattaaccctagtgtgtattatctagaaagacaacaccatactatcgaataacgtacaagtgatcgacaactcacaaaattaaacctgcttcaataagaacgtaaaaaatagaatagaactagtgcaacttgaattaacgccctcaattatgtcatgcagtgctagttccacggccaattaattttaaattaatctgcataaatttaattaacaagccacgagatttcagtacctgctataacatataagggtaagcaaaatcctcatcttacaatgcagccataactacttgaatttttatcatatgtacctagaatatattagacttaaatagcttgattttgtgcatatagtaaacactcactgatcgaattagttttccatatctctgttcgtcttaatgctgtccttctgcaacattaataatactgttcacttttgcataaaaaatgttaatcatctcaaataaaaaccgtacgtcttatccaatcctacttcgattaccatgtttctttatccccacacttctaaatatgctattttggtatcttaattagatgctattttatataattaacctactgatttacataaggaattcccacgaacccataaatcatgccataaggatggtactatacgctcatttcccacctctttaattttaatattgtggcagactggtaatcaaccaatttggcctatatatagtcgtccccacattatcaagattccacatgtccacccaccttctaaatccattaaccactcccacattcccttcaatctccctaactccagagtatctagaaaccaaaaccttttttttaaccttcattcaaaggcatatacaatgtgagtttaatttttatgtatggttctcatactccatatataattatttgaaaattagttatagtataaatatctttattatattttcacatgactcttaaaaaattccttctgatctttctttttatagtataaatcacttgtatcgtttaaagaaaataataatatttgagtcaagtannnnnnnnnnnnnnnnnnnnnnnnnnnnnnnnnnnnnnnnnnnnnnnnnnnnnnnnnnnnnnnnnnnnnnnnnnnnnnnnnnnnnnnnnnnnnnnnnnnnnnnnnnnnnnnnnnnnnnnnnnnnnnnnnnnnnnnnnnnnnnnnnnnnnnnnnnnnnnnnnnnnnnnnnnnnnnnnnnnnnnnnnnnnnnnnnnnnnnnnnnnnnnnnnnnnnnnnnnnnnnnnnnnnnnnnnnnnnnnnnnnnnnnnnnnnnnnnnnnnnnnnnnnnnnnnnnnnnnnnnnnnnnnnnnnnnnnnnnnnnnnnnnnnnnnnnnnnnnnnnnnnnnnnnnnnnnnnnnnnnnnnnnnnnnnnnnnnnnnnnnnnnnnnnnnnnnnnnnnnnnnnnnnnnnnnnnnnnnnnnnnnnnnnnnnnnnnnnnnnnnnnnnnnnnnnnnnnnnnnnnnnnnnnnnnnnnnnnnnnnnnnnnnnnnnnnnnnnnnnnnnnnnnnnnnnnnnnnnnnnnnnnnnnnnnnnnnnnnnnnnnnnnnnnnnnnnnnnnnnnnnnnnnnnnnnnnnnnnnnnnnnnnnnnnnnnnnnnnnnnnnnnnnnnnnnnnnnnnnnnnnnnnnnnnnnnnnnnnnnnnnnnnnnnnnnnnnnnnnnnnnnnnnnnnnnnnnnnnnnnnnnnnnnnnnnnnnnnnnnnnnnnnnnnnnnnnnnnnnnnnnnnnnnnnnnnnnnnnnnnnnnnnnnnnnnnnnnnnnnnnnnnnnnnnnnnnnnnnnnnnnnnnnnnnnnnnnnnnnnnnnnnnnnnnnnnnnnnnnnnnnnnnnnnnnnnnnnnnnnnnnnnnnnnnnnnnnnnnnnnnnnnnnnnnnnnnnnnnnnnnnnnnnnnnnnnnnnnnnnnnnnnnnnnnnnnnnnnnnnnnnnnnnnnnnnnnnnnnnnnnnnnnnnnnnnnnnnnnnnnnnnnnnnnnnnnnnnnnnnnnnnnnnnnnnnnnnnnnnnnnnnnnnnnnnnnnnnnnnnnnnnnnnnnnnnnnnnnnnnnnnnnnnnnnnnnnnnnnnnnnnnnnnnnnnnnnnnnnnnnnnnnnnnnnnnnnnnnnnnnnnnnnnnnnnnnnnnnnnnnnnnnnnnnnnnnnnnnnnnnnnnnnnnnnnnnnnnnnnnnnnnnnnnnnnnnnnnnnnnnnnnnnnnnnnnnnnnnnnnnnnnnnnnnnnnnnnnnnnnnnnnnnnnnnnnnnnttctctcaaaaatctgaattctagacatcccacgtgtaaaaacctttttttttttaaagagttggggacatatgaaggagcgaaatgcagaatggtaggtacgtggataatataatgcagtaaaatattacatttacatattttgttttattttacttttggttctacggataatgttgaagaataattttggcactctaatgttttggtagaagaatatatgcgcatgcagacaaaagcagtgtccacagatcagtgtttctacagttgcagtacgtgtcccctcatttatttttggcaattgtcacgaaccaattaatacagtaataaaataataccttaattgtttcagcatcgtacatcaattattgacgttgcagttatggatgctcccaagactgagggattatggattatcttcgtaacgtgatactacattgggtctgcgtctggatatctgctcctgtttgtcttcttttgaataatactatttgagattttttataattatataatagtatgatattattaattaataaaacgaatattcaattttggaatttgagttaattagttaattaattttataaagagtttagttaaatttctactacatttatttttgtttaggtatatgtatgtagaacattttttgctcaattaatacaaaactcaattttgtatatctaatttttatatccttatgcacaagattcattgtatttctatataatatgcagggtgtcagactggtactatatatcttttcaagagtttccttttcatatatgttttttcagatatctttgcacggctgctaaacaattaagaacattataattatatatataaattttaaagtaattaattattgttataaaagtaaaaaaaatattatcatttacaataatcaaagattaaagtataatataatttttttacaatttaattaaaatatttaattacatctttttaaatcaatttaattaaataaaataatgtgattttttggtatttgaagggaagtatatataacattgcttagaatgttcaaatatagattttcatagttctatatataatatggtctcgcaaatcaactggccgagcaagattgaagagtatcgaccacatttggactttgaattttgtcaataacgtttttcagatttaaataagtttttatcctcgtcaagtatagtttttttattttagtttatgaagtttttttttcctattaatccatacaattattttaaaatcttaatccttgttattatcagataacaatgtgataacgtaaaaataatattgacatataattgaaatgtcttgaaatgtcaccttaccaaaaaaatttgacgatatgtaatttttttaactatacttttaattactaattaatttatctgacattatcaattattactattttgaacacataagaattttttttattattatattataacttataagtgtgaaatattcacccattttctcagtaattaattaatatttgttgaaaaatatctattattttaatagattctctcttttaattatatttgcaaatttttaattcacaatttaatttaaaaaattaaatgcgagtttagtatcaatgaaactaacataatgcagatattgtttttttacaaatataatgttgatatttaaaacggtatgtttcaattttcaagacctctcctaagtcctaagcatgtcaagcagtgaaatttctccttttagatttggttagttgaactgtatgtgccctaagccctaactcattcagacccacagagataatagatttgttaacatgaggctcttctgtcgccacgcgttccatcatttcagtctctaatgaattttcctcttcgcacacatcccacaccacgcgcgtgtgaccgttgttttgtcttcttgtcttgccctaattgtacacgtaaaaataatggagaagcacaccacgacacctcttaaacatggatacattttatttttgggcaatagatgtttttgcaccttctttccccaacaccatcatgaccggtggtttctcagtatacacaacgtgttcttgcatgtgcactgggtttggataactgccatatttcacaataatctcccattttgcaaattgctagtgtctatatatatttccattatttgagcaaatgttacaaagaaataagttagaaggagtatgtccttatttaaattattatttgttgaagtttccaaataaaatacaaacgcgcaggcatatataatgcttgaatgtgctcaccactcctctttatgattgtatatcaaaatctaggagctccataggcgccttttgagcatttttaaatggaaaatgctgaatatatatggtagttgtgggtggtttaattaatttctcttttaacttggttctctggagaaagttttggattgactgtgacttgatacttactattcaaacttttaagtcggtaaaagtgatattttgaagacttaaaaattaatagatgaataaattatataaatcttattcattccatatttttttatatctcatattttcacgtggtattatcattaatgatttggtttggtgagactctatttcttattttatccagaaagaattatttagaaataaatataatatgtctttgttataggttcaaatgattatacatgaattttgattttggtttcccacaattctttattttctttttggaatataatacagagaaatgtgttgttttggttattgatccatgatcgtaatgtcaatctagttggaattatattctttaatatgctctagtacatctcctgattttgattaaataaataaatttggagtgtacgagtagacaaaagagggacaaataaaaannnnnnnnnnnnnnnnnnnnnnnnnnnnnnnnnnnnnnnnnnnnnnnnnnnnnnnnnnnnnnnnnnnnnnnnnnnnnnnnnnnnnnnnnnnnnnnnnnnnnnnnnnnnnnnnnnnnnnnnnnnnnnnnnnnnnnnnnnnnnnnnnnnnnnnnnnnnnnnnnnnnnnnnnnnnnnnnnnnnnnnnnnnnnnnnnnnnnnnnnnnnnnnnnnnnnnnnnnnnnnnnnnnnnnnnnnnnnnnnnnnnnnnnnnnnnnnnnnnnnnnnnnnnnnnnnnnnnnnnnnnnnnnnnnnnnnnnnnnnnnnnnnnnnnnnnnnnnnnnnnnnnnnnnnnnnnnnnnnnnnnnnnnnnnnnnnnnnnnnnnnnnnnnnnnnnnnnnnnnnnnnnnnnnnnnnnnnnnnnnnnnnnnnnnnnnnnnnnnnnnnnnnnnnnnnnnnnnnnnnnnnnnnnnnnnnnnnnnnnnnnnnnnnnnnnnnnnnnnnnnnnnnnnnnnnnnnnnnnnnnnnnnnnnnnnnnnnnnnnnnnnnnnnnnnnnnnnnnnnnnnnnnnnnnnnnnnnnnnnnnnnnnnnnnnnnnnnnnnnnnnnnnnnnnnnnnnnnnnnnnnnnnnnnnnnnnnnnnnnnnnnnnnnnnnnnnnnnnnnnnnnnnnnnnnnnnnnnnnnnnnnnnnnnnnnnnnnnnnnnnnnnnnnnnnnnnnnnnnnnnnnnnnnnnnnnnnnnnnnnnnnnnnnnnnnnnnnnnnnnnnnnnnnnnnnnnnnnnnnnnnnnnnnnnnnnnnnnnnnnnnnnnnnnnnnnnnnnnnnnnnnnnnnnnnnnnnnnnnnnnnnnnnnnnnnnnnnnnnnnnnnnnnnnnnnnnnnnnnnnnnnnnnnnnnnnnnnnnnnnnnnnnnnnnnnnnnnnnnnnnnnnnnnnnnnnnnnnnnnnnnnnnnnnnnnnnnnnnnnnnnnnnnnnnnnnnnnnnnnnnnnnnnnnnnnnnnnnnnnnnnnnnnnnnnnnnnnnnnnnnnnnnnnnnnnnnnnnnnnnnnnnnaagaaagttagttgatatcatttaattttactaatcttaaataaaaaataagattatcgatatctttattgaaacttgatattatgaataaaaaataatctttgaaaattgaattgtaaatgatatttaaaaaatatataaccaattagagtgaatttagtttgatttgcttattttgagttccacctacaaagtgacttttttgcttatatttaattccagaggaagtacaaaatatgcgaccattatcactcttagaataatgcaaaacaaattactcatcaatgccttttgattaagagaatacaggacacgccatcaatgtccctacatcctacattcctaccttgatttcagtactttaaaatttctcttctaagtgcatgtttggattttagttcaaaatgcagtatacaaatcccaaaataaatctgatggtttgcaaacttaattttattaaaagaagagtctggatgcttttacaaacttcattttgcaccaaacgtctgtttgcaactaaaaaacaaacatatactacatcttccttttcttcaatctctcattttttgcactatttttttcaacttaagaaataaaagacatttgtttgatgaattcatcgaaaccccccaaatgttcatgattgttttttttnnnnnnnnnnnnnnnnnnnnnnnnnnnnnnnnnnnnnnnnnnnnnnnnnnnnnnnnnnnnnnnnnnnnnnnnnnnnnnnnnnnnnnnnnnnnnnnnnnnnnnnnnnnnnnnnnnnnnnnnnnnnnnnnnnnnnnnnnnnnnnnnnnnnnnnnnnnnnnnnnnnnnnnnnnnnnnnnnnnntaaatgattaataataactaacacattttatttaatcaattgagttaaattgtttgataaatattgataaccgtgaacaactttaacaatttacttgaattcaaaacgttaaattaacaatctaattgcccctacgtgttttaaacctgttaactatatagcagtacatctctataatagacaactcctacgtgtttatcaattattaaggacatctacgagaaatttatttgatcttatgaaaataagatgtgactctcatgagtaatgagttatcttttaaactaattttaacaagttttatgacatcaacccttatacaataagagtttattgaattaatatataattatttatttatctcattatatcgatctgaatagaatgttccgtgagaagcactaaaaaaaaactatattaacagtggtagtggacacaaccaatttaggcaatgtctatacaagaagcaatatatagtaaaattaaaatcttaattatgcaattttttataatatattatttttaaatattaatgataatttaacatgtgtattattgaaattatctagatataaaaattaattaaaaagtcttctatgaacatgaacattataaaataatatacagcattactccttttgatcatttgaattttgaactaaatcagatgtttcctacacatgttaattctacttacaaactatcaacacgtacggttcgtatatatatatagaaagtttggtaatttcaaccatatgccttctattctccaacatgcagaattagggtgggttgacaaccttacttacctgcaagttagattttgcatgaccccgatgtttgggacttattcacttgtgctccacatcctcctctaccagctgcatcatgtttttaggagtattcccactaatagcatgaccaggtagcttgtggcccacgtttgccctaacctctgaccatgaccactaccacttgcatctaagggtgatcatgaattcatatgatgccaggtgatgagtattttttttcttctcttacttcaactaaaattatgataggatcatttatttgaatttgttcaaaactcttgataatatataacacagaattaggtaattaaacttaatttataaacatagttggcgaaaacaaattagaatagaagatcttatgcaaattacctctcaccaatagttgaatcctaattaatgattctagtatatcaattttaacattgtgaaaagatttttttatcttaatcctccaattcattgagaaaacaagactttaactaatcaagaattcgactaaaagatcaataaagtttccgtcaataatcaaacttagatattacttagaaagatttaatattaacttcaacacattgatcatttatattcaatcatatttgatttaacattgtgtaaaactaaatcatacaataaaaaatgtatatataaaacttaaactaaggcttaatatatatttgaaaataaataaaatgattataaatattatagtattatattatgtaaaatactacagtaccttttatttgctatacataattattaaaaaaaaattatatatactctttaaagaatataaaacattgaattggacagggacaacccaattcaccctcaaattacatcggatgtaatttctaaaatttgatctgtcaaaaatcgacaaatcagatattgatagaacggaatatacccctagttgcatgtaccttattccaaacattcctataagtactcttgattggttactcaattacatttactgaagcttaattatttgggcgttgtgtctatataaatacatttctatcgttgttccatcgctctccatcgcgatccactccgtcattgcacgatgggtttcttccatattaccaacatgtagggtttcaccaagttaattagaataatttagcattttcaaattaaattttgtctaaccttgccagtaagggataacttaattggtaggattgaacaatcgtatgcgattgacaaaaatgggttcaattcttaataatagttctagctattaaaacattttgtgaaggaaattgagatgggaagagtttgcattctcataaacaatattttcaggaatattacgactagttaggtaaaatatataagtgtttttagaatttaaaacttctagaaatatttttcaaagtttaaaggaccagagaaaaaagtgagagtgagaagagaagttaatagttcagatatgaatatttttgtcattgttattcaaaataagattgcctttcacaaaaattatatgatttgtaaaataaaaatgtcaagttgttttattcaaatacttaacttctctcgatatcttctctaaaaaaaggaattaacttctcgatcttgcatgtcaatagaagagaagttgagttttggaatataataattaacctgaaatttcttttatacaaaaaaaatccatatccacatacatatgggataaaagagatgaataaggataaaagaatagaaacataatactgacacggggttattcttctctttcaacttctcatttatctcgtatatatgcatgtgagtatgaatacttatacttgtaccattcttactcaatttatctctcttttattatcatttttctctaattttgtttaccttttatacatacccccataaaataaagtgcaactttaatatttcacaaaattctcagttcttttgtagaaggtaacatgaaaatcaaatcatgaacccgtagtccgtagagattggcacttggcaagttgtctttcttggaaactagctttcttttgtatttttatcccttgtagctttgtactggtacaccctaaattaagtttatcacgagtaagagagatatgaacatcttcaaacccacttaattataaattaataatgacagttgttaatctaatatttttttacttatgagaatcaaagcaaaccgaaccaaataaccaaataaccacagtttgtttgtcatccccataaaatcccaatcacattaacatttattgtcacactcactctctccttccctcttagactcattggtagtacgaactagaagtaaccatgtccggtcatcgacgccaaccctcccaagcctttccgccggacctcttcgccgccgacgacctcactaagccctttgacttcacacaaatcatcaccgaagaaaccggaaccgccgccgctgcccaagcctcacgcattcagacccaccaagagatcaaagactctcctctcaccgccacttctccggcgaagagcaaggcgccgccggcaaccaaatcggcttgaaccaccgtatgcaccatgagtctgctcctgcctcctgctgctgcattttatgtctgtcattttctgtttttctgtttttcttttcttctttcttttctttttgtttgaaataaaattgttaagatgacagcagagaaaagctcaaggcattgtaacatggttttcttcttcttcttcttctgtgtttgagaaacttcctttttgttagagcttggaatgtgaggctttgttgtgatttgctgaccctgcctctttctatttgaagtttctatcaagatttttttnnnnnnnnnnnnnnnnnnnnnnnnnnnnnnnnnnnnnnnnnnnnnnnnnnnnnnnnnnnnnnnnnnnnnnnnnnnnnnnnnnnnnnnnnnnnnnnnnnnnnnnnnnnnnnnnnnnnnnnnnnnnnnnnnnnnnnnnnnnnnnnnnnnnnnnnnnnnnnnnnnnnnnnnnnnnnnnnnnnnnnnnnnnnnnnnnnnnnnnnnnnnnnnnnnnnnnnnnnnnnnnnnnnnnnnnnnnnnnnnnnnnnnnnnnnnnnnnnnnnnnnnnnnnnnnnnnnnnnnnnnnnnnnnnnnnnnnnnnnnnnnnnnnnnnnnnnnnnnnnnnnnnnnnnnnnnnnnnnnnnnnnnnnnnnnnnnnnnnnnnnnnnnnnnnnnnnnnnnnnnnnnnnnnnnnnnnnnnnnnnnnnnnnnnnnnnnnnnnnnnnnnnnnnnnnnnnnnnnnnnnnnnnnnnnnnnnnnnnnnnnnnnnnnnnnnnnnnnnnnnnnnnnnnnnnnnnnnnnnnnnnnnnnnnnnnnnnnnnnnnnnnnnnnnnnnnnnnnnnnnnnnnnnnnnnnnnnnnnnnnnnnnnnnnnnnnnnnnnnnnnnnnnnnnnnnnnnnnnnnnnnnnnnnnnnnnnnnnnnnnnnnnnnnnnnnnnnnnnnnnnnnnnnnnnnnnnnnnnnnnnnnnnnnnnnnnnnnnnnnnnnnnnnnnnnnnnnnnnnnnnnnnnnnnnnnnnnnnnnnnnnnnnnnnnnnnnnnnnnnnnnnnnnnnnnnnnnnnnnnnnnnnnnnnnnnnnnnnnnnnnnnnnnnnnnnnnnnnnnnnnnnnnnnnnnnnnnnnnnnnnnnnnnnnnnnnnnnnnnnnttacaaataataaataagattataagaatgtgggatatgaatatgcacttttatcatacattgtgtttgtgtttggtagactttattatacatttttttatggatatattatatatcttattgtgggtttgaatatgatttaaaattttatttattgttcataattactaagcaagctaaatatttattaattacaaaaaaataagcaaaaaccaggcatcatattgtaatttgaggtcactaaattaaaaaggacattactcttaacctcataaagttatatgtcacaatttattgatcgaaatgacaattacttttgttttatttaaaaatctattattttaattatttatttacttcagcaaccaaagaatttcagtcgctatataaccactgatgtagcaactaaagtgtattctacaatcacttcaaaaatttgtaatatgaaacaaaattaagttactgaattagagacaggggtcataccgaccgaaatagccactttcttaattaaaaaaaattagtgagtaaattagagatatagattactgtcgctgagttagccctttgccaagaaaagtgaccaaacaacatacgaatgagtagtttaaattagcaactgtttaaagttattattgatttttgggacatatttttcagtctctaattccgtcgctagtatgtagttttttaaatgttagagactgattccttggtcacattttctttttgggacatttttttatttttaagggtttgattggataaatttctttataaatacatacaaaaagataataagaaaaaaaaaacttctttaaaagctaaaattaacttatgcgtaaactaatttataaaagttctttcatattaacttctccaaaagttgattctcaacttatgcataagatctgaagaaactaagacatatttagataagcttatcctaaagcaattatagaaaaaaaaaagaaataaacttctccataaagtcaaattaacttatgcatgttctaattactcatcttttagaaaacttatacgagagagagcttttacaaattaattttagtctctaagctaattttaacttattttttctcataaatatgtttatagataagcttactcaaacataccattatgttatttttctttcttattttcttctcttataagtgtttatggataactttatcttaattttaaaacaaaaacaaagaggcaaatgcaacaatttgggagttgaaaaagtcttgatccaacttagtcattcaaatctttattttttgaataattaattagtattcgtaatattattattttttataaatataatataatattgttaaaatattttgatcgttgttttcaatcaaaatattatttattaattcttttgcaacaaggatgtaggtgtcaacatagttgagatgtatatcctcattgttatgcatcaacactccattttgaagaagaaaaatcctttgtcattaccttaacgttaattattaattaaaacattttttttttgtaatttcaagtattaaaacaagtattatttttaacgttagctacaaaaataataatgagcatttagtagcttttgacataaaaataatatttcttcgattttaagacttaggttaattaatactcgtcatttaagagattaatttaatgtatcactggaacttttcaaacagagcagaaataacgacaacaagctctaacatgaaaactgattcgagaacaagattaacaaacacatcgacactggaaactgtacacaacataatggcaaaataaactagctagagaaagcctttagcaaagagacacccaccattgccaccaaaactccgccgattaagaactctaaaagcttcatgtaaaaaaattagggaactacaagattgaatcctatagaaaatatgtttaattattactccttgcgtgaaggcacacggatacataggtaaaagcatataaacgataagtttgtttttgtattattcaaaacacataaagtcgcaaatgaagctttctgatccctccttatcagttgtcaccttgattggtggggttgttccaatagagcatgttcaaatctgtaggagaagtagggggttgggcattcatttgagacgaggttgaagctccaacagtgttgttggtgatgccataattgatagcattactcataatagaagcataacggttagcatgagtactatttataataggttgaacatttggatttgtgatgggataccccacctcttgtactcatgctccttgaggagtgaagccatgacataaggtgtgtttgaatacaagtcaaaaatacttttgagagtttttctaaaaaaaatataatatttttttcaataaaaaagttctcaaaaacatttctagtctagtattcaaatagattcatacacatgttcttccgcagcaataagcttgcctctaataaggccagcaaagtgttgaggtgttgttcccttcgagagttgaatgtttaagaaggagatgggaatgttcttgggaggtaaaggtgaaaggctttttggtgcaaaatccctttaggcctcttagcaataccaattggttcatgaggaggaacatatgactcagtggataaccgataggtgacaacaaagttgatgatagaggtgatgatggtggtgggaaagggagggttgtttcacaaagaggaagaaagtaattcagagattgggggcacaatatgcaggacgtggtgtgaaccttttgtatcttttatgacaatttatagagcagtttcaaagattggatgatgtggggatccactaattagattttcatttagatacacatttatctatttttaagttttttttcttctaagagtatctcacaattttatgaaactaatttgttgaataattaaatcattaaaggattattttttgtagcaatttttttgaacaattaatatagtgttgttttagattttttaggggacaaattcacaaatatatatattttttgtttaaatatatttttgttccatgataaatttatgaattttgtatttggcctttaataaaagaaattcttgaattttgatcgctgaaaagttcaggaattttatatttagtcattgccattaattacattttctttattaagtgttacatgtttcattagttttcttttgtctctgattttttttaccacaattgtgggtatttttccatcaaatgacgacatttaattaaaaatattatatattttttttttttgaccagcattaaaaatattatatataacaatttgtaataattaactgagacttggtgccatgtttttctgcttagtatgttaaacgttaaaggtggttgagggtgacggggttggggcgatagagggtattttattttccaattttaagctttcaatcccatgcattatattaaaaatattatatctatcagtctgtaataaattttcttgatcatttaaaacaactattattttgtaacgttagctactaaaaatattgctcatttagtaactttggacataaaaaaatatttttaaaacttcaagacttaattaaattaattaatactcgtggtttaaaagattattttaatgtattactggaactattcggtcaaagaacaaagagaacagaattgtagcacggaatttgatttgagaataagactcacaaacacatgcactagaaactatgctcatcataacaacaaaataaactagttgaagaaatccttcagcaaagtgaaacccaccatgggcacacaggcccccttagttaaaactctacaaacttcatgcaatttttttttatacgattaaatctcagagaaaatatgtttgtataatttctccttgcttaaagacacgaaaatacatagataaaaaagcatatacaaaaactctattattgtattattcaacaggttttaactcactcacacactttttgattttttttttttattataggactgacgggacttccctatttttttatatagtaaatannnnnnnnnnnnnnnnnnnnnnnnnnnnnnnnnnnnnnnnnnnnnnnnnnnnnnnnnnnnnnnnnnnnnnnnnnnnnnnnnnnnnnnnnnnnnnnnnnnnnnnnnnnnnnnnnnnnnnnnnnnnnnnnnnnnnnnnnnnnnnnnnnnnnnnnnnnnnnnnnnnnnnnnnnnnnnnnnnnnnnnntttgattacaatcatagaaaacatttttgttaaagaagcaactaatttaatgagtagttattcaaaataacttctgattttaattccattttagatttttttttcaacttctgatcgttttgaaaagctgaagcaaatacacacaaaaaaaaaacttttaaaactgatatatatatatatatatatatatataaaagaacgaaaaatactgtaacaaacagacccataaattttgcaattcattaataaatgaatcattattttatatgttatgtgaattataaacatgttttattttaaactgcaggctaaatgagccaacttgtatatgagttgaaaatgggttggttctcatcgagctcaagccctcatcagctatcagttaaaatggacggttcgcatatcataacccgtttacccacctccaatcaccacatgtttacatgtgactttggtattagtattaatggataatataaaaagataaaattttctgtacaatacatggaagatcacctttttcttactgaaggaagataatttttgttatttcttttaactaaaaatatctttttaagttgcatttatattagaagtgtaaaaaaatcaaaattttataaaacttcatagaagaagataaagtatatgtaccagttgaaactatttgattaaatttgaaaaaaaaaaatcagcaagctcacatcaaagatcaaactaacccaaagatcaagttggtatactttggcctatcaaattgatgacctattaatatattaaaatctcaatttaaggtttaggatatagagtttagaatcattcataaagaaaaataatatggtaaaaatatataaaaaatccttaaatttataatattaattaaaaatatatttgtctaggggattttttaataaaattatatatatatatatatatactagttagagtttagttggtttaattttaaaaaatacgaatttgtgtgtgaaaaataaagcaatttaagtagtcaatgtttggtttaaaattacaaaaatactttttcaaattttaatataaaattgtgttctaatgtatgaatcgagaaatatttttttttattgacagatattagtaattaataagttatagtaaaaagatttaaacatataatttatttattactctaatttttatgtactttctcaattatcaaaccaccttataactctgctaattttaaaaaatattatttttagagtaaaagtacttttaagctcctaattttaattgagttaaccaaatctagtaaacacatctaatgtataaaataaaataaaatgtatataatattaatattcaaataataaatatcaaaatatgagaaatttcttatccaaggcaagcataattgggcgaacattgtcccatcccattcccatgtcagaaacatgacctttagtcttcacttgataatcacaatagccaataggctttcctatattacaaagcaaacttctgaaaaatggtcctaattaagaggacaaaatgtattaataaagcaaccaattcatagtcaatatcaacaacttcgtatgggcccagttccgaagccaataataggctttgtttgcttgatctaacaaaattgacgcgtgtcgtattttcgtcctttgcacataaaaacatgaatatgctttttcttccttaagcaacactactacagtaaccattatctcaacaacaacaacaacaacaaaaaatgtacaatttctttagctgaaaacaaattatgtatgattgatgatgtgcctacgtttgattattatttcttacctaaacctcactaattattttccacttaaattcagatgcagtaacgttgacaattgtgacagatgttttgcaattttgattgtgcaaaaagcaataacgagaacaatttggacgtggattttggattccacatactagatttcgttgtctcctctgaactgttttcacgatgagctccatattgtgttgacaaaattggtgaatctgccccaccatccaccagaataacaatagtcaacaaaatttggctcggatttcttagcctttgatcatgacattagtttttaatggaaaacgtatatcgcatattgaagtagaatggtgaatatagtttaaactctcagtcctctgaagtattaacactgtgccttcttgcaatttaattagccacacaagtaatataactactgctatcagaaattgcacaaaatggattaatctcataaacaattttttttaattaatcatttgatccttacactttgtctcatctttttatttagattttatatctaaaaattctctgttttagtctatttattcatgcaattttttttatgttttagtagttgtcgattttctagcaatataaaactgccacagagtagaaatataagaattaaaacataaaataattgttcatatgaaaactaaaacagagaatttataaatgtaagaataaaacccatatcctcttctaccggctcaacattgttaattgagtcacattaggttctaaaagaatagcttttactctgcatatatctaatcctctttacaagagttgccattttttagtacataaacatgctttaaaagtcactgattttaatggtatagtaattgacaaaaaccttgccatgattacactatagaaaactgatgcatactcatgaagcattttttgggttgcacagccatgagttaagcaataaacaagacatctaaaacagaagattattttcatcacctaaagtgcaggtcaaacaaaccaggactaactaaaatctttaataaatatcactgaggaaattgaggtaggtacctgatgctataataattaaattctcacaatctcatatgcttgctattttcaacaccaagaggggtgatcagaagaatgctctactaccataaaacacacgtgatccatcctttttcttcttatcaatttctaatttgctgctgtcatgattctgaatcacatcaccatcaccatgatccactttttcaggtttgtcaaggtccattgggagcttcatttttgccaaggactcagtgaactgctgcatgctcctcatatacatgtccactatttgtttttgcatagcagcttgctcagcttctaaattgatgttccctagtggagctgaaaaaacttgaccaaactttgcagcttctgtgttgttgttattgttttttttgctttccttttccttgcttgagaagtttgcatctttgtcatttctggcatcaccttcttctttcttggaagttggggtatctggaccagcaccacagttttgactaccttccacagttattgacacagtgacagaatttgatgagtcaccagtgctcaaatggttctttttctcaactgaatcagctgagtttctatcatcactcaaggttgtgatggtggagcctaggaagcaagagttctgaatgctctcatttggagaaatggaccctacatgattctcatcttgtgaactcatagtcatctcataatcatcaagttgaggagatgcaccaaggtgaagaaatggtagtgaccctccaatgttggaccttgaaggagcagaagtagtaccttgagaagccaaattgaagtactcagataccatttgctgattctccttcaccacactgatgtcaggaaactcaattctagcatactcaactgggtccaacataacttttgaggtctttctatcaagcaaaataacttctgatgatattgatgagttctttgctgattcagttatcaaattcactgatgagttgatcgccaaagaggggtccaaagacagtgttagttggacagttcctgcaggagagtggaaaagatcagtggaggaaaggctgtaatcttcagtcacctttccttttccaacaacttgtgaaattgggaccaaagcaaaccccaaaagctggtcttccatgtgaatccttgacctactaaacatccaaacttcacatttcagaacagcatctatttgggtgatcttcatcctcaagttttcattgaatgttgggtttttgccacctccattgatgattcttgtagagagagtctcatcagggttgtaagtgagagagaacttagcatacacatcctggttgtcatagatgcatatgttatgaatattcctggcatgatggacaaagatatcaagaatccctgagaactcagcttcttcatctgcatgtgtccttgtgttcaaatttggattgtacctgaagctggaattctgaacactctgattgaatgaatccattccaagttccaacctttgttatgccttggaattttgctttgcaaccagccagaaggtttccaaaattaggaaacgcgagagaaaaagagttggtgttgatatttggatcatcaatgatcaccttttggatacatagaagaccaaaacaaaaaaaaaacttgattatagaacaagctagaaatcagtggaaagtagaaaaaaaaaaagtatctaaaggattaaacagcaaaagaagagggttttctcacctagtagaatgaatggtaacaaaaagttaaataacactagctctctatgtatgttggggtgagtatcttgtagttgaagacatttgtcaaatcaatccatgaattcaggaacaagcatggataaagatagagagaaacttggagttcaatgaagtggattgctttatggaatggaagtggggtttaaggaccttgtggtagtaggtgaaaaatgaagcatggaaatgaacagagaagagtattatgatgtacatgtttgtttggatgccacttttggtgttgggtttctttgcttcacaatgcagcttccatatatctctattctctatctagtgcatagcttgctccactgatgacactaatgctattggaggacccacttgccaccatcttcattatcactctccccgctcttcaattgatgctaccctcagctttcagacaacataaattgccttgtctctcaagggctattgcaacaaaaacaattcatctcctattggaatccgttcaggtcaaatcatggaaatattgagttaccaagataacaaaaaatcttggttttagtttaacattctaaaatacactttataatatttatatatatcatgcgacaaaataccaccattaaacccaactaatgaaagtaagtgatttccccgtattttgtatgctttttttgaagggttagatctttcttattttaacgacgtattttcaacataaaactgtgaaaataactagtcctgttaaatttctcctaactaacctatctaatttaattaaatattataatttaaaacttcggtgagttaaaaagaaaacaaaaaatgttgtgctttaatatcttcctgccttctgttgactgacttcttatgtttaaatatgtgaatagctaataaatggaagtaatttctttttaactcggatattttcagtcgagaactaaaaactaatcaattgtttaatggaagtagtttagctaacaagaaattaactattttgttttaaaaaccataaattccattctcaactactagtacgtaattccccttagaaagttttcatgtcctaactttgataaggaagctttctccacaataaactttttgtagttaaatttaaggaaagtgagcaagacaacgagttgttggaaattcattccactttgttaatttgaatgattatgcaaaaagtttacgttggaagtcttggattcaagtccgcaacatgtggtatatatgagcaatgagggtaacaccagaaatcataacctttgactgctaatttgcctgtttcttttccctacatggagccatattggtaatagcctctctctctctcgcacacacacacaaacacgaaacactacaagctcaaaaagttaccgattaaaaaagaaagagagaaacacgaaatttagtgggaaaaaacttcacatagtgtcaaattgttcccacaccccatgcatagcaagataagacgtcatgatatagacttccccataatttgttaattgtgttatttccttcttccatttcgtagtggatcacaactggtatcactttagtccttcctaactacgttgtaagttataagccacaacctaacaacatcccctctcttagacttttggtcctcagtgccctaccaaaattgcaatttgcaattaatctactagcaataattttagttattctctatttatatatatatatatatatatatatatatatatttacgactattatgggaacatttttccatagtttgcaataagaagttttctcaagaatggcaaagtttaaaaataaaataaggaaccaaaaacaaaaaataaaatagtcctgcatttttcgataacaaatcagaattgaaaaataaagtaattagctgtattgaaagcattcattttgacaaaggggatatatcattttgatatattcatatcaaatcacttaattaattctgtttaaaaaatcatttaataaattaaaaaaattgtactcaattatattgtttgatgaatgttatgcaaatcttaattagatagagaataaatataatttatatttaatagaaattaattacttaaatttattaaacaataatggatgttttcttagcatttctcgtttttataatctaatcnnnnnnnnnnnnnnnnnnnnnnnnnnnnnnnnnnnnnnnnnnnnnnnnnnnnnnnnnnnnnnnnnnnnnnnnnnnnnnnnnnnnnnnnnnnnnnnnnnnnnnnnnnnnnnnnnnnnnnnnnnnnnnnnnnnnnnnnnnnnnnnnnnnnnnnnnnnnnnnnnnnnnnnnnnnnnnnnnnnnnnnnnnnnnnnnnnnnnnnnnnnnnnnnnnnnnnnnnnnnnnnnnnnnnnnnnnnnnnnnnnnnnnnnnnnnnnnnnnnnnnnnnnnnnnnnnnnnnnnnnnnnnnnnnnnnnnnnnnnnnnnnnnnnnnnnnnnnnnnnnnnnnnnnnnnnnnnnnnnnnnnnnnnnnnnnnnnnnnnnnnnnnnnnnnnnnnnnnnnnnnnnnnnnnnnnnnnnnnnnnnnnnnnnnnnnnnnnnnnnnnnnnnnnnnnnnnnnnnnnnnnnnnnnnnnnnnnnnnnnnnnnnnnnnnnnnnnnnnnnnnnnnnnnnnnnnnnnnnnnnnnnnnnnnnnnnnnnnnnnnnnnnnnnnnnnnnnnnnnnnnnnnnnnnnnnnnnnnnnnnnnnnnnnnnnnnnnnnnnnnnnnnnnnnnnnnnnnnnnnnnnnnnnnnnnnnnnnnnnnnnnnnnnnnnnnnnnnnnnnnnnnnnnnnnnnnnnnnnnnnnnnnnnnnnnnnnnnnnnnnnnnnnnnnnnnnnnnnnnnnnnnnnnnnnnnnnnnnnnnnnnnnnnnnnnnnnnnnnnnnnnnnnnnnnnnnnnnnnnnnnnnnnnnnnnnnnnnnnnnnnnnnnnnnnnnnnnnnnnnnnnnnnnnnnnnnnnnnnnnnnnnnnnnnnnnnnnnnnnnnnnnnnnnnnnnnnnnnnnnnnnnnnnnnnnnnnnnnnnnnnnnnnnnnnnnnnnnnnnnnnnnnnnnnnnnnnnnnnnnnnnnnnnnnnnnnnnnnnnnnnnnnnnnnnnnnnnnnnnnnnnnnnnnnnnnnnnnnnnnnnnnnnnnnnnnnnnnnnnnnnnnnnnnnnnnnnnnnnnnnnnnnnnnnnnnnnnnnnnnnnnnnnnnnnnnnnnnnnnnnnttattttcatcttatctttattattgtttaaatcctaattttaaattatttatcatatattcattatataatattacgctttcatcattattatataatattttgtattttccttcatgtgacaccttttcaaggtacattcatcactaacttcatacattatacactttaattataaaacaaagcttttgaggatggtttcttttctttcattcattttttaatttaagtctacgtcaatgattcaatgccacacagagttaatgatgaaagtaccttgaaaaacattgtcaaattatggaaaaataaaaatattgtataataatgatgaaacgcaatattatacaatgaatatatggtgaagatagtttaaaattatgtttaaagaaaaataaagataagatgaaaataaaattttatataggattnnnnnnnnnnnnnnnnnnnnnnnnnnnnnnnnnnnnnnnnnnnnnnnnnnnnnnnnnnnnnnnnnnnnnnnnnnnnnnnnnnnnnnnnnnnnnnnnnnnnnnnnnnnnnnnnnnnnnnnnnnnnnnnnnnnnnnnnnnnnnnnnnnnnnnnnnnnnnnnnnnnnnnnnnnnnnnnnnnnnnnnnnnnnnnnnnnnnnnnnnnnnnnnnnnnnnnnnnnnnnnataggtatatgtaattctagaaatacattactagaaagtaaaagatgggtgtacttagtaaaaggatgtgtaaatagtaagtgccttctttttaggccataagggctatcggtacttgtgaatggctcgtttaacagctccttatccgtggggcaaggatgtaactacataactctaaaaaaaactatatataggtagagtaaaaatatatgatattattcttattgaattagaaaaaatttcagtgcgttatagttttgtttttatggtaaaattttaaacacggtcaataattatttatttaaaaatcttaaagttttgggtcgaaatctatatcaaaataactaaaaaaaatataaaaatccttgtgaatgtttttatcattttaggtatataacctactttcactgaattggaaaagttaataaaaatatgcaccagctcggctccaagaccagtattacattgtttgtaagaaggaacgactggaaccggatccctgcagttaatttttgaactgcatggcgcagttataaatctaaagttgaagtttttaaattgttttatcatttatttcaacataaaaataaatggataaaatatacttatagtctctataaatataatttaatttaatttagttcttagaaatgttgctaattttagccttcataaattttattttatttttaaatcaattgccatcattatttactaatgatgtaaaatacatttagacatatcatgttacatatcacccccggaataattagttatataatacagctagatgtatacgtactacatcaccactttgtaatgacatgggctatttttttataaaaaaaattacgagaactaaaattaataagataatttttagacacaaaaattaatcatatcaataagcacataaacattttcaagcaaaaaagtaattgcaagtagatgaaaatactacagttattttataattgcaaatgattgttacttggaaatgtacctagctagccaacacattttaggagttatacttctttctctttctcaacacgtttgctatcttcttttcttttagcatgaacacaaatgaccaagtgtgtgtttaatttagcatctcaaattcacatttgcaggtaaatttatgtttaaattgtattaataacgtagaactaattattatttgtgttgaaattgacatgcgttttctatcgctcatccaaacacacggtaaaacaaatatcattattttaaaaaaatgaaataataattggggaaaactttttaatactctaaaagattagtatgccatggtagttaggcctactagcaaagaatttgggattttgtacgaaatcactatcacagtgagtgaagcaacttttaatggtgtgcaattaattagaaagtcaatcagtaaactagcatgacaaaaagaaacttttagaatgattctaatcaaagcatggaatttgatttaaaagtgtgagtagcacttattggtgcacatttaaaccaaaagttaattttggttctcaacgattaaggcacaaagccgatttagaaagcaattcaagatgctcaaagggccctcttttgaaagctctccgcaatatcttgttattgtattcagtaaaagctttcttgaagccagaaaaccaaccgtttaaataatgttcgatgcacaaatagtaatgtgcatttagaatgtctgtataaaaaattcttacttaattatcaagactttcccaaatacactttnnnnnnnnnnnnnnnnnnnnnnnnnnnnnnnnnnnnnnnnnnnnnnnnnnnnnnnnnnnnnnnnnnnnnnnnnnnnnnnnnnnnnnnnnnnnnnnnnnnnnnnnnnnnnnnnnnnnnnnnnnnnnnnnnnnnnnnnnnnnnnnnnnnnnnnnnnnnnnnnnnnnnnnnnnnnnnnnnnnnnnnnnnnnnnnnnnnnnnnnnnnnnnnnnnnnnnnnnnnnnnnnnnnnnnnnnnnnnnnnnnnnnnnnnnnnnnnnnnnnnnnnnnnnnnnnnnnnnnnnnnnnnnnnnnnnnnnnnnnnnnnnnnnnnnnnnnnnnnnnnnnnnnnnnnnnnnnnnnnnnnnnnnnnnnnnnnnnnnnnnnnnnnnnnnnnnnnnnnnnnnnnnnnnnnnnnnnnnnnnnnnnnnnnnnnnnnnnnnnnnnnnnnnnnnnnnnnnnnnnnnnnnnnnnnnnnnnnnnnnnnnnnnnnnnnnnnnnnnnnnnnnnnnnnnnnnnnnnnnnnnnnnnnnnnnnnnnnnnnnnnnnnnnnnnnnnnnnnnnnnnnnnnnnnnnnnnnnnnnnnnnnnnnnnnnnnnnnnnnnnnnnnnnnnnnnnnnnnnnnnnnnnnnnnnnnnnnnnnnnnnnnnnnnnnnnnnnnnnnnnnnnnnnnnnnnnnnnnnnnnnnnnnnnnnnnnnnnnnnnnnnnnnnnnnnnnnnnnnnnnnnnnnnnnnnnnnnnnnnnnnnnnnnnnnnnnnnnnnnnnnnnnnnnnnnnnnnnnnnnnnnnnnnnnnnnnnnnnnnnnnnnnnnnnnnnnnnnnnnnnnnnnnnnnnnnnnnnnnnnnnnnnnnnnnnnnnnnnnnnnnnnnnnnnnnnnnnnnnnnnnnnnnnnnnnnnnnnnnnnnnnnnnnnnnnnnnnnnnnnnnnnnnnnnnnnnnnnnnnnnnnnnnnnnnnnnnnnnnnnnnnnnnnnnnnnnnnnnnnnnnnnnnnnnnnnnnnnnnnnnnnnnnnnnnnnnnnnnnnnnngtcatgtggaaaatcaaattgatgccaaatttattttggcggtaaaccaaattagagaaatatatctatctatttaagtaaactagatttgaagaaaaaaaaacactataattttaaagaaatattaatgtaatacttaatgctattaatgtaaattttataaagatatgtaaataaatattttttttcttatatagtatttaataggttaaattaatcttttttcactgcaggttaaattaatatgtaaatctctaaatttgaaattttttaatttgatctataagattagcatcaacaaaactaaaaagagttatgctcaatggtaatagaaattgttattaagcatttaggattaactaatatattttacaaagaattgttaaaacttaatttccactaccaaacgcctccttcttaaagtgatctattaacttgttaataaggtatttaaaaacaattctacctagtactttattgaaaaagactatattagcttatattctaccaaaatttaatcactatagtctaaaatctttaaatatttttccatcccttcagatttcttaatattattagaatgatggttttttattcccttttctctgctcggctccaaatatttaaaattttaaacttctcttctcatttctattcccctacaatcaaatgttatgtttcttttttatttgttttttctgtaatcaaactaagaggaagaaataaaacaagctcgatatgatcacttgttgggctaaacccatacatacacctacaagaactcttataactttaggacgaacattttatttggatcttactatttacaccccgtactcccctttctatctcttgattatccattataccctttttcttaaagaagtacacctcttttacattttagaaatgtctttctagaattacatatacatatttcagaaatgtatctctagaactatgattcatagtttcagagatatacttttagaataagtatatattttttttaataaaataccacttaaaaattaagatgattgacgaaaaattaaaaataatgataaacgcttattttatactcatgttcgttggtcttattttcattctatcattaatgttctttaaatcttattttcatcttatctttattattgtttaaatcctaattttaaattatttatcatatattcattatataatattacgnnnnnnnnnnnnnnnnnnnnnnnnnnnnnnnnnnnnnnnnnnnnnnnnnnnnnnnnnnnnnnnnnnnnnnnnnnnnnnnnnnnnnnnnnnnnnnnnnnnnnnnnnnnnnnnnnnnnnnnnnnnnnnnnnnnnnnnnnnnnnnnnnnnnnnnnnnnnnnnnnnnnnnnnnnnnnnnnnnnnnnnnnnnnnnnnnnnnnnnnnnnnnnnnnnnnnnnnnnnnnnnnnnnnnnnnnnnnnnnnnnnnnnnnnnnnnnnnnnnnnnnnnnnnnnnnnnnnnnnnnnnnnnnnnnnnnnnnnnnnnnnnnnnnnnnnnnnnnnnnnnnnnnnnnnnnnnnnnnnnnnnnnnnnnnnnnnnnnnnnnnnnnnnnnnnnnnnnnnnnnnnnnnnnnnnnnnnnnnnnnnnnnnnnnnnnnnnnnnnnnnnnnnnnnnnnnnnnnnnnnnnnnnnnnnnnnnnnnnnnnnnnnnnnnnnnnnnnnnnnnnnnnnnnnnnnnnnnnnnnnnnnnnnnnnnnnnnnnnnnnnnnnnnnnnnnnnnnnnnnnnnnnnnnnnnnnnnnnnnnnnnnnnnnnnnnnnnnnnnnnnnnnnnnnnnnnnnnnnnnnnnnnnnnnnnnnnnnnnnnnnnnnnnnnnnnnnnnnnnnnnnnnnnnnnnnnnnnnnnnnnnnnnnnnnnnnnnnnnnnnnnnnnnnnnnnnnnnnnnnnnnnnnnnnnnnnnnnnnnnnnnnnnnnnnnnnnnnnnnnnnnnnnnnnnnnnnnnnnnnnnnnnnnnnnnnnnnnnnnnnnnnnnnnnnnnnnnnnnnnnnnnnnnnnnnnnnnnnnnnnnnnnnnnnnnnnnnnnnnnnnnnnnnnnnnnnnnnnnnnnnnnnnnnnnnnnnnnnnnnnnnnnnnnnnnnnnnnnnnnnnnnnnnnnnnnnnnnnnnnnnnnnnnnnnnnnnnnnnnnnnnnnnnnnnnnnnnnnnnnnnnnnnnnnnnnnnnnnnnnnnnnnnnnnnnnnnnnnnnnnnnnnnnnnnnnnnnnnnnnnnnnnnnnnnnnnnnnnnnnnnnnnnnnnnnnnnnnnnnnnnnnnnnnnnnnnnnnnnnnnnnnnnnnnnnnnnnnnnnnnnnnnnnnnnnnnnnnnnnnnnnnnnnnnnnnnnnnnnnnnnnnnnnnnnnnnnnnnnnnnnnnnnnnnnnnnnnnnnnnnnnnnnnnnnnnnnnnnnnnnnnnnnnnnnnnnnnnnnnnnnnnnnnnnnnnnnnnnnnnnnnnnnnnnnnnnnnnnnnnnnnnnnnnnnnnnnnnnnnnnnnnnnnnnnnnnnnnnnnnnnnnnnnnnnnnnnnnnnnnnnnnnnnnnnnnnnnnnnnnnnnnnnnnnnnnnnnnnnnnnnnnnnnnnnnnnnnnnnnnnnnnnnnnnnnnnnnnnnnnnnnnnnnnnnnnnnnnnnnnnnnnnnnnnnnnnnnnnnnnnnnnnnnnnnnnnnnnnnnnnnnnnnnnnnnnnnnnnnnnnnnnnnnnnnnnnnnnnnnnnnnnnnnnnnnnnnnnnnnnnnnnnnnnnnnnnnnnnnnnnnnnnnnnnnnnnnnnnnnnnnnnnnnnnnnnnnnnnnnnnnnnnnnnnnnnnnnnnnnnnnnnnnnnnnnnnnnnnnnnnnnnnnnnnnnnnnnnnnnnnnnnnnnnnnnnnnnnnnnnnnnnnnnnnnnnnnnnnnnnnnnnnnnnnnnnnnnnnnnnnnnnnnnnnnnnnnnnnnnnnnnnnnnnnnnnnnnnnnnnnnnnnnnnnnnnnnnnnnnnnnnnnnnnnnnnnnnnnnnnnnnnnnnnnnnnnnnnnnnnnnnnnnnnnnnnnnnnnnnnnnnnnnnnnnnnnnnnnnnnnnnnnnnnnnnnnnnnnnnnnnnnnnnnnnnnnnnnnnnnnnnnnnnnnnnnnnnnnnnnnnnnnnnnnnnnnnnnnnnnnnnnnnnnnnnnnnnnnnnnnnnnnnnnnnnnnnnnnnnnnnnnnnnnnnnnnnnnnnnnnnnnnnnnnnnnnnnnnnnnnnnnnnnnnnnnnnnnnnnnnnnnnnnnnnnnnnnnnnnnnnnnnnnnnnnnnnnnnnnnnnnnnnnnnnnnnnnnnnnnnnnnnnnnnnnnnnnnnnnnnnnnnnnnnnnnnnnnnnnnnnnnnnnnnnnnnnnnnnnnnnnnnnnnnnnnnnnnnnnnnnnnnnnnnnnnnnnnnnnnnnnnnnnnnnnnnnnnnnnnnnnnnnnnnnnnnnnnnnnnnnnnnnnnnnnnnnnnnnnnnnnnnnnnnnnnnnnnnnnnnnnnnnnnnnnnnnnnnnnnnnnnnnnnnnnnnnnnnnnnnnnnnnnnnnnnnnnnnnnnnnnnnnnnnnnnnnnnnnnnnnnnnnnnnnnnnnnnnnnnnnnnnnnnnnnnnnnnnnnnnnnnnnnnnnnnnnnnnnnnnnnnnnnnnnnnnnnnnnnnnnnnnnnnnnnnnnnnnnnnnnnnnnnnnnnnnnnnnnnnnnnnnnnnnnnnnnnnnnnnnnnnnnnnnnnnnnnnnnnnnnnnnnnnnnnnnnnnnnnnnnnnnnnnnnntttacaaattttgacaaggcccgatacattcagtatttatatataaaaaagaggatatgaacaatttttaacagtacaaaattatgtaaaaattgagagaatattcaattccattacactacacccagtcacccactacccaatgtgggtaaaaagcttggcatggtcagagaattaaaacttaggagagagatggagaaaaacatagaggcatatgaagggttaaaaaaaatagagatctaaatttagaattatattattcatattctacttattataatattatattattcatacctttgcaatttttaatctgaccccaaatcctgttcacatctccaatcttgagacaaaaactcaatcaaccagaaaagggaggtttcaaatgggattttagccagatgcgtttataccttgagtggttttcatacgagcattgtttaatttatacgcttcatcatatgctggagagaccaaactcaaccaacaagttaaaaaggaggcttcaaatgtatgattattcttcgcatccctagtttatagaccaaaaaggaaacaacatggctggcccttaagaaaaaactaggttgtgcctccacttatgaagctaaaaaaataaaaaataaaaaatcctagaagaatgtcctcacaatctataagctcttttgaggaaagataggaagaaacatgtgattagttctgttaataatttgttttaagagataaaactatccgaaggttatactcgttttttttactgcaagtataaaatcataatagtacatcaacacccttatttatccacctgaattttgttaatacaaatttgagaacttgatgtgttgtgtaatgattcagtttttattgaatacaatattaaagaattttcaatcactcataaattatgttttaactaattgagttagatcttttttattatgtaaaagtttggttaaacgcatttttatttnnnnnnnnnnnnnnnnnnnnnnnnnnnnnnnnnnnnnnnnnnnnnnnnnnnnnnnnnnnnnnnnnnnnnnnnnnnnnnnnnnnnnnnnnnnnnnnnnnnnnnnnnnnnnnnnnnnnnnnnnnnnnnnnnnnnnnnnnnnnnnnnnnnnnnnnnnnnnnnnnnnnnnnnnnnnnnnnnnnnnnnnnnnnnnnnnnnnnnnnnnnnnnnnnnnnnnnnnnnnnnnnnnnnnnnnnnnnnnnnnnnnnnnnnnnnnnnnnnnnnnnnnnnnnnnnnnnnnnnnnnnnnnnnnnnnnnnnnnnnnnnnnnnnnnnnnnnnnnnnnnnnnnnnnnnnnnnnnnnnnnnnnnnnnnnnnnnnnnnnnnnnnnnnnnnnnnnnnnnnnnnnnnnnnnnnnnnnnnnnnnnnnnnnnnnnnnnnnnnnnnnnnnnnnnnnnnnnnnnnnnnnnnnnnnnnnnnnnnnnnnnnnnnnnnnnnnnnnnnnnnnnnnnnnnnnnnnnnnnnnnnnnnnnnnnnnnnnnnnnnnnnnnnnnnnnnnnnnnnnnnnnnnnnnnnnnnnnnnnnnnnnnnnnnnnnnnnnnnnnnnnnnnnnnnnnnnnnnnnnnnnnnnnnnnnnnnnnnnnnnnnnnnnnnnnnnnnnnnnnnnnnnnnnnnnnnnnnnnnnnnnnnnnnnnnnnnnnnnnnnnnnnnnnnnnnnnnnnnnnnnnnnnnnnnnnnnnnnnnnnnnnnnnnnnnnnnnnnnnnnnnnnnnnnnnnnnnnnnnnnnnnnnnnnnnnnnnnnnnnnnnnnnnnnnnnnnnnnnnnnnnnnnnnnnnnnnnnnnnnnnnnnnnnnnnnnnnnnnnnnnnnnnnnnnnnnnnnnnnnnnnnnnnnnnnnnnnnnnnnnnnnnnnnnnnnnnnnnnnnnnnnnnnnnnnnnnnnnnnnnnnnnnnnnnnnnnnnnnnnnnnnnnnnnnnnnnnnnnnnnnnnnnnnnnnnnnnnnnnnnnnnnnnnnnnnnnnnnnnnnnnnnnnnnnnnnnnnnnnnnnnnnnnnnnnnnnnnnnnnnnnnnnnnnnnnnnnnnnnnnnnnnnnnnnnnnnnnnnnnnnnnnnnnnnnnnnnnnnnnnnnnnnnnnnnnnnnnnnnnnnnnnnnnnnnnnnnnnnnnnnnnnnnnnnnnnnnnnnnnnnnnnnnnnnnnnnnnnnnnnnnnnnnnnnnnnnnnnnnnnnnnnnnnnnnnnnnnnnnnnnnnnnnnnnnnnnnnnnnnnnnnnnnnnnnnnnnnnnnnnnnnnnnnnnnnnnnnnnnnnnnnnnnnnnnnnnnnnnnnnnnnnnnnnnnnnnnnnnnnnnnnnnnnnnnnnnnnnnnnnnnnnnnnnnnnnnnnnnnnnnnnnnnnnnnnnnnnnnnnnnnnnnnnnnnnnnnnnnnnnnnnnnnnnnnnnnnnnnnnnnnnnnnnnnnnnnnnnnnnnnnnnnnnnnnnnnnnnnnnnnnnnnnnnnnnnnnnnnnnnnnnnnnnnnnnnnnnnnnnnnnnnnnnnnnnnnnnnnnnnnnnnnnnnnnnnnnnnnnnnnnnnnnnnnnnnnnnnnnnnnnnnnnnnnnnnnnnnnnnnnnnnnnnnnnnnnnnnnnnnnnnnnnnnnnnnnnnnnnnnnnnnnnnnnnnnnnnnnnnnnnnnnnnnnnnnnnnnnnnnnnnnnnnnnnnnnnnnnnnnnnnnnnnnnnnnnnnnnnnnnnnnnnnnnnnnnnnnnnnnnnnnnnnnnnnnnnnnnnnnnnnnnnnnnnnnnnnnnnnnnnnnnnnnnnnnnnnnnnnnnnnnnnnnnnnnnnnnnnnnnnnnnnnnnnnnnnnnnnnnnnnnnnnnnnnnnnnnnnnnnnnnnnnnnnnnnnnnnnnnnnnnnnnnnnnnnnnnnnnnnnnnnnnnnnnnnnnnnnnnnnnnnnnnnnnnnnnnnnnnnnnnnnnnnnnnnnnnnnnnnnnnnnnnnnnnnnnnnnnnnnnnnnnnnnnnnnnnnnnnnnnnnnnnnnnnnnnnnnnnnnnnnnnnnnnnnnnnnnnnnnnnnnnnnnnnnnnnnnnnnnnnnnnnnnnnnnnnnnnnnnnnnnnnnnnnnnnnnnnnnnnnnnnnnnnnnnnnnnnnnnnnnnnnnnnnnnnnnnnnnnnnnnnnnnnnnnnnnnnnnnnnnnnnnnnnnnnnnnnnnnnnnnnnnnnnnnnnnnnnnnnnnnnnnnnnnnnnnnnnnnnnnnnnnnnnnnnnnnnnnnnnnnnnnnnnnnnnnnnnnnnnnnnnnnnnnnnnnnnnnnnnnnnnnnnnnnnnnnnnnnnnnnnnnnnnnnnnnnnnnnnnnnnnnnnnnnnnnnnnnnnnnnnnnnnnnnnnnnnnnnnnnnnnnnnnnnnnnnnnnnnnnnnnnnnnnnnnnnnnnnnnnnnnnnnnnnnnnnnnnnnnnnnnnnnnnnnnnnnnnnnnnnnnnnnnnnnnnnnnnnnnnnnnnnnnnnnnnnnnnnnnnnnnnnnnnnnnnnnnnnnnnnnnnnnnnnnnnnnnnnnnnnnnnnnnnnnnnnnnnnnnnnnnnnnnnnnnnnnnnnnnnnnnnnnnnnnnnnnnnnnnnnnnnnnnnnnnnnnnnnnnnnnnnnnnnnnnnnnnnnnnnnnnnnnnnnnnnnnnnnnnnnnnnnnnnnnnnnnnnnnnnnnnnnnnnnnnnnnnnnnnnnnnnnnnnnnnnnnnnnnnnnnnnnnnnnnnnnnnnnnnnnnnnnnnnnnnnnnnnnnnnnnnnnnnnnnnnnnnnnnnnnnnnnnnnnnnnnnnnnnnnnnnnnnnnnnnnnnnnnnnnnnnnnnnnnnnnnnnnnnnnnnnnnnnnnnnnnnnnnnnnnnntatatgacaaattttgtcaaacacggtcgattctgccattctagataaattcataaaggaactgttccatacaatcacccaagaaactcataaagttcaattcaaaataagtgtgcctggaataattaaacggacacaagcatcctgaacgtatacggcacaaaaagtaaaaataacacgatgaaataaacgattctcaaataataaatattataaacctagattgtggaatcaagtaatcaactaagcactgaacaatcctttactatatgagcacaaaagaaaaattccacacattccaatcacttcattaccacccttatatatggactaaaaaaatacaacacgcacactagtcagaataatgacacgtttccttaaaaaatacatggtgaagaatatgattgtagctgttaaataatcgcatactaaaaacccagggaatgggagaaaaccaagtaacagaaatgactttacacaaactcctatataaacaatcgtagaaatcactagacatttggaacaaataatacgagcttaagtcagactatggcagagccataatttgatggaaaaataattcactgccacaagcattgtgagatcacaatacaaaacaaaagcaacaaaatttcggaactgcaaagagcatgtcaagaaattaaactgacaaaaaagcacaaatagggcaaaacatgaaaacccagtatcaaaaatgcatatcaacatgtgtaacagagacagtgaagaaaattcaagacaaaatgcataaccatgtgcttaaattttttaaatggaaataaaagtctcagaacatgacaaaattaagacatgataatggatcacaggcagcaacaaagcaaaagggggcacaacaaaattgttcgcagaacatgactaaaagcagacgcataaaactctagtgtacttaaatgtgagcaattcaagagtagtgtcctcaccagcacagacatgtaccttaatgttccaacataattacaccaaccatgtgaagctgtatcaaataatagtttctaccaaaaaatacccaaagataaagggaggccccccacgcaaagaaagaaaaactagttacccaatcattcacaatggagaagaaaacaaatgatagtgctaacatatttttacatatgctcccaaatcccagaaaggaaaaacaatttgccagcacaagacaagctaaaactacccactggtatcaacattctaaatgcctgctctagggcacaaacaaattgttccaaacacaacccttaaatgaaattaactaaagacagggtaattaattctacatcagtggaaaagtaaagtaaatgattgcttttttattgacatgataggaagagttagacagatcagcattatgattcaagaaatannnnnnnnnnnnnnnnnnnnnnnnnnnnnnnnnnnnnnnnnnnnnnnnnnnnnnnnnnnnnnnnnnnnnnnnnnnnnnnnnnnnnnnnnnnnnnnnnnnnnnnnnnnnnnnnnnnnnnnnnnnnnnnnnnnnnnnnnnnnnnnnnnnnnnnnnnnnnnnnnnnnnnnnnnnnnnnnnnnnaaaaaaaaaaccactggtacaaaaatgtgaatgcattgtccatattagtctattaatgaactatcatagcatgccacaacacaagcaatcctatgcttcatggatatttcatgagtgaaatatgtagcaccatagcaaacacaagacaaacaagatatatatataaaaactgtattgcaatccacatgacataatcgtcctaaatataaaatatattcagacaactaaaagggggcagcatgtgcaggaaaagataatctaaatatgcaatgaatagagacaatcattcatttgtttatcaatggtcggaaaccgtatctaagaatctagccaaaaaaataagtgacacatctgcatcttctccggcaatacagtatataaaagctgagaatgcaacctcgacatcaacttatcctgataagaaaaaataacatacaaggcaagttctaggatatccgcatgctatagaataatattacaaatactactattaaaatcttttagaagagaaaggaatggctttttaaatctaaaatgggtctagattgcaaatgaaataaatgtgacaccaactcaagctgcacatattggtatttgaagtttagcaccatagtgcaccaaaattgagcaacagaagaattaaacagctttaattttggctagagacactggaaaaccgactgttattgttagaagatgaaaggttcggtaattgttattgcctgaactacaaatcccaaacaaagaacaaaaggaaataggagttacattaagtcttcatgaatgcagaaactttgcaggtttctcacgcatcagagatgaccaataaactaggatgaaaaggacagacatacattgacggtgacgttacaacaacttctaatgctcaagtctaacacagcagctacttgtaaaatcaacatttatttattccacaatatttaaaacaaactgagccatcacaaagtggcaatttaatattagcatctagaactaaggaattaaataatgtattatgtttatgtctattcagaaaaatcgaagcactccaaaataacgagtaaataatgctgaaaaatacatctggaacgcaaaggggtgaaggcacatcaataacaattatcagaagatattaacacatataaactcatctttatcatacgctttatactgtagcaattgattgtgggtataatactgtagatttcacctttggcaaatttaagtataaaacaatgaaaataaagggtgagtaaaatggaaaacaaaaggcatttgcttcaaaagaaaagttgatataattgttgcaagcttgcaatcaataatgttaactaaaaataaaatttaaaatagtgaaccaagtaaaataagttttaatcatctttgctttccagtttgagttaaatttagtacataagaaacaatttcttttaacagttagaagatagtgaggcttcctagtcactaactgatgatctcatgcaatgacaagggccagattgggcgagagaaagaattatagaactaaaatcaagttgaaaaatggcagacagaaaaacagtgacatatgcaataaaggtacaaagcctagaagaaaattaaaatatcatcagcctctccaagcccatctactaatatcttgcactcggaaagacacagtttttcagacactttcagatcaattcattggattaccatatgctgaagaaccccctagtaaccctccaccagaagctgcataaacatcattaggatccaccattggagacgaagatgaaaccccatttcttcctgcaccaccacttccaccattttcaccacccaaatgcaactcagataggttaggatacacatccctattctccactccttgatcatagagaaaccctttgaacacgtggccaccaatcttcaccacagcttgatatgcatactcatcttgcccatcctccactgccgtcactcttacacacttgaaaaccgctggtgcacgtacttgcccaggtaatgactctttgaaccccgcatctaatgcacacaattcaacaatacacatcacaattaaacaaccttaaaaaccctttcaactctcaaacccatgcctatgcaccaacccaaaagaagctaatgcatgagttttttttttttccgagagaatcgaagacagtctcagaggtttacaataactcatgcatcacgcaccctgctcaacggcagacccccttgacgctaatgcatgagtttatgttaatatatgtgtattcatgcaaaataaaatcatttcattattatgaaaagaaagcacaaaccttgatggctagagctagtgtcaaagcttctaggaggggtggtgttggaagtggaagtgtgggaggttgttgtggtttgtgaagcaatgagcctaggttttttagtgccggaagtggagccactggagccggcgacagccgcggtggccgacgtcattagctggcgctctctccggcgtgcggcggggacccaagtgctcttaacgtgggtagggcaatcaaagcctcggcttttgcaacaggttctgcaccttctattggtacaatctttctttgcctgatttccacaatcttggcacgttgttccgccgctactagttccagaagcagttacctcgccactgttctgaaccaaattccccgaactggtgttactattatggtctagaagaccctgctgcagctgcttcttcatgtagtggctttgatggtgttgttgttggtcttgccatagctgaattcccccaccgccacgtgtcctatttccgaggatgttgttgttgtcggattccaggcacggcgtggcggcgaggagagggatgacaccgacgccgagtgcagtggcggggttgagggaatccgccatgacggccggatcgtgttgcggcggttggtggtggtggtggtggaaggaagaagctggcgccaccacgaacatccccatttcggggtaattgattgacctagctgcggtggaccacattccggcggtgggtccggtggcggcggcagcaggacccgcattgaagccgagggagaggtcgtcgacggggacagcgcggccggcaccaccaccagcaccggaggaagctgtcgctgcccagtccgcaaaggcaccagaatctgaaggtaacctccttgtagtagccacaactgaaaatccttgattacttctcaaatcaagagacaatataagtaacaatatatagtttacttcttctgttagtaaaaaaaaaaagaaaaaagtggggtgtatagtaggtggaaagacagaactaagtgtagaactatagaactatagaagcatagatcttctattgtctaagtggtggtgtatatatattattttgtatgagggtgtatctaatgtgggtgttattcttcttggggtggggtcttgtggcagggaaagaatttgttggtggaggaaaagaaaagagagaagttttctcttttgatggagtttagtgtttgagatgagatgagatcttgttgtattgttagggtgaggtggggtggggtggggtgggggagttgagtggagtggacttagatttttctctctctatgaaaaggaagggaaaacgaacaacttctctgcttcttcttctgtttctgctgctgctgctattgtggctactactactactgtcactttggcttttttccacaggaagaaaaagttttggttcgagtaagaaagagagagaaagaaagatcagtttctgaagggtccagccagcagaagagtgcagagtgagcagtgaatgagaaaatgcaataacgacttcttacttactgtgtctctctttctctctctctctctctatctatattttattttctttctctctgctttgctttgttattgttgccgaccttttctctctcttcatatcatcatcatctctccttccttcgcaaacctagctaagcttctttttcttccaatatttatctctcagaactaaagtcctttctttttcttggcttcctatgaaaagtgaaaactgaaatgggttcttcttcacttctcttccctaacctttctttcttttccaattcccacacacagactcttctctctctctccaattatcaggctctgataattagtagtagaaagagagaagaaggggaagagagagcataaagacttttgttctctagtttttgtaattttatggaccctatatgaaactcacatgacgccacttattacttgtgggctcggcgcgtgagcatcactccccgcgcgtagtgcattttctcaccccagaatacctacacaaacaccacttacgtctcaatcccacttcacttggaacggcgcgtggacgcaactacgttctatctgtggcacgcatgtaatttgggacgttgtttatttttgagaataaaattaaaccatgttgttgagtagcactcagcaatatactgtagtctataatctaaggtgtcatccatatctttttccttttttactaagagagtccttccaaccccatatctatgaattctttttctttagatcgtctttgtcagatatcaatttattgagtgagtctctctttaaattgcacacaaagagtttttctgtgatttttttttttttttgcaatttatgtgcatatgctcagatgacagttaatcgaacttaagcttttgcttattgatttagttgttgttttttatgactctgtcaaaaaaatggttgaagattagggtgctgagtttatgtgtatatatttcaataagatttccaaaaaatacacaccggctcttttgtctgtgtccagccatttattaatacttctttacctgtatcaattaactacataaaatgtgtaactaaataaaaataaaaatagtcatagttttcaaataacttgttgttttgacttcataacaaaatactgatggtcttgctggtgttggttgttgtgtacctcacattattgtaactagacaatagctttctagactttggcacttattaagcttgtatggaagctctcactgtattgaatctgaactcaagctttatgcttctcttcatactgaaatcacacaaaaattaaggttttcactccaattttttttttttttttnnnnnnnnnncgtatagaagctattttgttagggtagattgttttggttatcttttttttaaatatatttttcgagttatcatcatacttctttaatgtaaaattcatttcttctaatatataataatatattttttcacaagtgagacttactatatataacttatttttgttttaaataatttactactggttttaggaagggaaaacacaatcccaatgaaacacttaaaaatgagagtgtgttttttaaatgaataaaaactaaaaaaaacttttataaaaactaaaaaaagtattctatttgatagtataaaaaaaattgagtaacaattcatccttttatacttttctcaaagtgttatagagctttttttatgcaagaatagctcttaatgatttatctataaaacaaaatacttcttgcatgggaggttatggagtgcttcggttacttcaagtaaagtcattacatttgtggtggtatatgacagtttttgcgacagacagcttgggaagcttttgctaaataattttgctagtttggttttttttgttaaacataagcagttccaaagttgtctttttacagacatttgatagaagacataaaattaatatttttatttatatttactaaaatggaaagatgaagtacaaaactagagcagtgaaaattcctctgcttgaaataaaatgcatctttcaaatttgaaaaagtttcatcccacgtagacaaaaagaatatctcatgagttacgatgcaattcagatgagacttgagaggacaaaacaatgttatgnnnnnnnnnnnnnnnnnnnnnnnnnnnnnnnnnnnnnnnnnnnnnnnnnnnnnnnnnnnnnnnnnnnnnnnnnnnnnnnnnnnnnnnnnnnnnnnnnnnnnnnnnnnnnnnnnnnnnnnnnnnnnnnnnnnnnnnnnnnnnnnnnnnnnnnnnnnnnnnnnnnnnnnnnnnnnnnnnnnnnnnnnnnnnnnnnnnnnnnnnnnnnnnnnnnnnnnnnnnnnnnnnnnnnnnnnnnnnnnnnnnnnnnnnnnnnnnnnnnnnnnnnnnnnnnnnnnnnnnnnnnnnnnnnnnnnnnnnnnnnnnnnnnnnnnnnnnnnnnnnnnnnnnnnnnnnnnnnnnnnnnnnnnnnnnnnnnnnnnnnnnnnnnnnnnnnnnnnnnnnnnnnnnnnnnnnnnnnnnnnnnnnnnnnnnnnnnnnnnnnnnnnnnnnnnnnnnnnnnnnnnnnnnnnnnnnnnnnnnnnnnnnnnnnnnnnnnnnnnnnnnnnnnnnnnnnnnnnnnnnnnnnnnnnnnnnnnnnnnnnaaaaaaaaaaaacatcagcgtacgttgtgctgctaatcaagcaaagaatccgatccatattaactagttttaaagccttcaaaaacagacttttcttgtggttcatagcaccctttgtacctcaagtcctcaactatatataatattaatgccattcacatgtacatattgggtactgctaagaatcgtccaacgcacgtattggacacaaaagcttctcctttttccctttgtatatgggatttttcggtgaaatgaatgtgcttgctgctttacatttatgtagttttctgatagtttcttatacaagaaggacaatacacaaaccaaaaaagttaagcacctgaaatcttccgccactttgcatctgaatgttacacagcgttcactatcttaatttttacttcacataatttttgtaacttgaaataccaaagaaaaatattttttatttacttaaaatttattaagaattataaaattatgagtaaaattcatcaaatatgatgtaaactcacacattgtattggtttctaacaaattttaatcaaggtgtgttagaaaagctatattactaggatttgtatataagtttttgctattattattatttataaaaaaaaaaaaacagtttactcatgtcaaatttttgcatcgatcgtataccaacatttacccaacttaggatactcacatgaacaaggcaaattgctaacaccagaaattgtgttttctgctactatatatggcacccctcaataaaaaaaaatcatatgtacattcatgtaggtaagtgatgaaagtgaaagatatgaagacaaagaaacaagattctctatcatcagcgaatccgcagcataaaacgaggacaatagagcagcagatccagtgacagtaaatttgttcaaaatggcacagtttgttggcgggtgccttgggattagatggtatatatggcctgtgactgcacgtggagaagatgaattaacgagagtcagcgctggcaattcaaccagatgggttgattttgtggtgttaatttgaacgtaaaaattatagttattagtttcttaaaacctcaccccaatgcaaacacgacaattcatgtctaaaatgtgaaactaaacattgtcatgagtctttatatatagagctcatgatcaataatgcagccacaattaaacaatgtaagcctgaaattaaaaaaataagcaattagaggatgtttgcttttccatttgtttaatttgttgccacgccgtgttctaataaagatccaatttgtaagaaagaagatgtgttggccaatctctgtttggtgcaccaccaattaattgtcaaacatgcacttagcaggtgaaagatttgttgttataaaagtatactctgaatgagatatataagtgacaagataatgttagaaaatagtcatagcagaattttttttggtcaagttattttatttccattcagtattgtgaacttattataaacttgatgttatgtagataataattaatatatatatatatagtaattatgttttatttaattttgcgaatatgttgatgtaacatgtataaatttactattaatattgtttttcaaaatgatcaagtcaatttaattaaataaatacacttaggaattattcaaataaaaactattaaatttctaaataaatttaatatttttttcttgttacaatatcattatatatttatgtaaggaaatggaattaaaatataaatgtatagtttataaaagtgtcgtgataaaaactttattcgtaaaatgtgtctatgaatagtatgaatatcaacacttttataaaaaacaataaaacttgaagttaattacttgtacggctcagtgaaaaagttctgagcgttttggcgcgtgtaagatgcatggtggctgtgagtaaattagccataaacttttacatgagaaaaacaacaaaggaacacgaaaccaaaaatataaattggaacatgaaaaagccttcccttgtttgccttttgtgataagctcgtgtcttaaggtcacttcatgggtcgattaattagcagtgttacttttggctaaatagaagatgattaagagcggcccaaagatgaaaagcaatagaatcattgttagataaggcacgtgaaagaatgaaaatcaagtttttgtgttatataattgataaataatcaagtatttaaacaggtatttagagttcatttttcaaatttatgtatatagaaaaaaaattgtaatttgtttaataagtttcactataagggattaattattggagatataagatttaatgaatcataaatgattaaggaaagaaaagaaagaaaagaaagaaaagatgttcgatatcatcggttaataaaattaataattaatgtttattaataaaaaaagagattaatcattaattttttaagcttaaaaataacatagatcacccaaaaaagtgaaagaagagaaagcaaaagttataaatgcaatgcctcttcatgtcctctttgggcaccttcttctctctttgtttggcccttgggggccacgagtttaatttcctcttcagtcttcacatcacacacttctctcaaggttcattcaattcattcctctctcacacatcttgatcttgtgaattgtaagcgtgtgtgtgaaagtaccctcttttttcaaagcattctaaaactctctctctctctctcttatacaaagtgtgttaatgatgcacttgaaaagcaatcacttctcacaccgtgttttccattgtctaactgtgcttaaagccagcttgttgttgtttggcctaaaaagtctttaattagtaatatttatgttgcccttctttgcaaagattattgcactgacgcacaaaagcagcatcttttcttcataaacaaacgcacattcattagtgctgtctatcgttttgtttgttactgtcctctctgggctctgcttctttctcactttctcatctcatcggttcttcccattacccatcagattatcacacatgcatctcattgcttttcacatgaaaatcaaaacatttctaatctagaaaaaaatatagtatttttggtaatatttactacaaagtgcaaaccatataaaactatatggtatatgataactatatagtagtattttatattaatggcatgattcctcgtgcattttaatcccacagttttttgttttcttttgtaggctcggtacgaattaaatacattataatttgatgctctaaaaatatttatattttgacaaccatgcatggatgcaatcgatatttatttaactagtggatttcatcatgctacataatcaaatggagaagcgttttgttttccgtttaatcggaaagggcaaaagtgcaccatattataatcgtaagtgtattacttgagtagcttagctttaatttccaccgaccgaaattcttttgggtacatacatgcatgatcattcacttaactcctacccaagcaaaattaaaaaggcaaaagcaataccaccaaaacaagttgttttcccctccatgcatatgctgataattgtctctatggggctctttatggtttctacaaacacgtaagtttcttctagaactatgcttttgttttcatagtacgatctaaattaatattttgcaaaaggcaatgagaattttaataccataataaggatataaattaattgagtattttattcgaactctactccttcaatactctttcaaattgtttatatcagtgaaaaataaaataaaaaacgtaagttctttgttggatgtcgggttttggtgttgaatccattgacccaacaattctattaatgtaacatacttttttattttaatttattattttgcatattttcataaataaaaaaatagagaaaaacacgcacacacaccccaaacacagttatacaagcaagtatactagttttttcttatcctatctaggattcttaattttagaacaaatcaaaacgtgcacatcttcattgttacatatgattttttgtgtttatagtgaaactgtatgaaagaaagaaaaaatcaaaatgcatatagtacaatgtaactaatcaaaaattatatcaaaatgtcatttgaaaatgataaaaaannnnnnnnnnnnnnnnnnnnnnnnnnnnnnnnnnnnnnnnnnnnnnnnnnnnnnnnnnnnnnnnnnnnnnnnnnnnnnnnnnnnnnnnnnnnnnnnnnnnnnnnnnnnnnnnnnnnnnnnnnnnnnnnnnnnnnnnnnnnnnnnnnnnnnnnnnnnnnnnnnnnnnnnnnnnnnnnnnnnnnnnnnnnnnnnnnnnnnnnnnnnnnnnnnnnnnnnnnnnnnnnnnnnnnnnnnnnnnnnnnnnnnnnnnnnnnnnnnnnnnnnnnnnnnnnnnnnnnnnnnnnnnnnnnnnnnnnnnnnnnnnnnnnnnnnnnnnnnnnnnnnnnnnnnnnnnnnnnnnnnnnnnnnnnnnnnnnnnnnnnnnnnnnnnnnnnnnnnnnnnnnnnnnnnnnnnnnnnnnnnnnnnnnnnnnnnnnnnnnnnnnnnnnnnnnnnnnnnnnnnnnnnnnnnnnnnnnnnnnnnnnnnnnnnnnnnnnnnnnnnnnnnnnnnnnnnnnnnnnnnnnnnnnnnnnnnnnnnnnnnnnnnnnnnnnnnnnnnnnnnnnnnnnnnnnnnnnnnnnnnnnnnnnnnnnnnnnnnnnnnnnnnnnnnnnnnnnnnnnnnnnnnnnncctttgtccataccttcattaaaggaattactctaaaagcataaattggtgataattattaaaaaaaagtgaacatacaaatgaagatagttatatatagtaatatgaaattgtagcataaaataataacaaattatttagactataaatgattttaatagtgggaaccaatcttagatcaccaattatcacgtatgataatattattagtttttataataattacttgaaaagttatatataatatatttttaattaattaagagtaaaatatcatgttaataacatatgaaaattactcaaacaataaatatccttgaatgtataataaatcataatactcttttcttctgaaaataagatatcaaacccaatccaaatcaaacttttatatgcatatacgtatatacgtttttatttataaatttattataccatttatgtttatatttttatttattttataattataaaattattttataacatatttatttataaaaacattttaattaaagataaatttttttaactatttgactgaaggtacgtatgtataattattaagtttaatagtacatatatttaaagagttatactactattagttattattgacttataaaaggagatattgaatattttaagttatcctttattatatatatttttatcatttatttaatcttttctcccaaaaagtaaaataagattaaagtaaaaaatcaatctaattcaaatggttttaaattgatcagatttaaaactgaatgatttatatatgaaaattaaagattaaataaaataattttattttccaaaaccgatctaattctatttgtaaaatctaatagtatttcttataacacgcggtgtattttttaaaaaaaaaaataaaataaaatacgtggaactgtatagaattttccttgggcaactcagattcctttcaaacagggtagtagcacagcaaaccgagtaagtatatcattattagacccgaaacgcaaaccaaaggctgccaaaaaaataaattatagggcatgatttaatgaccaactgctatatctaaaaatgggtacacactgtcatgtagctaaagcttaagtggaatgtaatctacgctaataatataatagtcttctctctctctctttcccttagcctttctctctctttcctttcttccttttctctgtttctgtcattgatgaactatagagaagcttcttaaacactcaatcgttgaccaaaacctttcacacccaacatgaaagttgaaagaaactactcaatgagctagattccatcatcacttttctctgaaaaccatcaaacaaagagatccagttctctaggaaaattcacaaagcttgattctgaggagaaaagaagacgttttaaggacgctcaagcttggaaaagctgttctctagccttttctgtcaatttagaggtaagaaacacaagttttacagattgatttgtgaaattgttcttggaatgaatagtgaccattttgtgatagagctagaattaagcttgagttctttagaaaagtatgctcaggaggttgttctgatgaatattaaactttgaaacatgatttttgatgaagtttggttttgaccctgagataggtatgggtaggaaaaatgttgagtaaaaggaagatattatgatagttatgagcctaagtgcttttacaaaagttgttcagaaggataaataaacggtgaaaatgtgttgatatatctgttttagtcattttgggaaattgttgatatatgacctagtagatcattgaattgagattatgcagagtctaaggggactctaagatcttggttggaccaagatagatcctgttgagggtctgtgaatcacctataagatggttagctctgataatcctaagatagagaacagagaggttttaatggaagggaatgacatttcctttcattctaacggctaaggaccgttattgattgattgttttatgtcttgtgtagggcgtgatagtaatcttgctggtggttgtgaccacgaagccaagagagccggtatagcgctgagagcaggtaagctctttgttcttgggagtgtttcccactgttgtgttccaccatactccgagggagtgatggttattgtatatcatgatgtatgtatattgaaattgtgtgattattgttttatgaacatatgcatatgatgaattgaacactgtgatagtgttgtatatgtgattaatgagattttctggccagtagaattatatttgatagaatatatatatgaaagtcctgttgtgagatgtgtccacatagtggatgagcctccaggatgtgcccacatagtggatgagcctccaagtgagatgtgcccacatagtggataatgcctcctcaggccttgatacataattgtaaatatgctatgtatgtgtggtaatatggcttgatagctgtgattactagtttaaaatgccaattttgatattatatgccatggaagtgaaccaaggagaggaaagacctccaaggaccctgagtttactgagattgttatctcacccctgttgggggttatgttttgcaggtgattcttagggagctgctgagagatcccagggcaagaggcccgagcagggaaaggttctgtgagaaccttaggcatagtgtttaagagcatgttggctctattcttttgatacatgcctgttattttgtatcctgatagggattttgtatagttttgaaatatacgttgtatattataagaattcaccatatatgatgtacagtggttgttaatgacgcttgatgatgtcatttagtttatcgcttccaaatttaattatctgtgataattgctgcgcttaatgaccataaatcaatgttaatgaaccggatgcatacggggcgttacaaataaattcattcagtttgctaatttcgcttcttcattttttattcttgacctatttggaaggacaaagaagattttgttccacataatataaatagtgtaagagaagaaaaaacagaatatgatcactactataatatacaaaaaagtgttttaaagaataggttcaatatcaagtgtttctcacattatccgactctattttgataaagagtttctcacattatcccaaggccaagtattaaaagtattaagtgcatgtttgaaaataactaaccaacacggattctataatctctcttcaaggctcatctttcaaatatgaggaagtaggtcttggtagcttcggagttacgagtgtgtcaaagggtcgctcatgcagaaccaaacacgttttaagtcagaacaaattacaatgttgagcgctagaggagttttcaagctaatgcaaaccacaagtagtcaagagttccctatgaactctcacattctctatgttctatataagtttgattttttttaatactactatcatttttttcctgcttaattcaaatgggaaaaggattctaaatcaaacatttgatctaattctaaatatgtggatttaaactatatataatttcgtgttagatttgacgcattgcgagataaatatgcttgctttcaattatttgacgcgacgtcaaactaaaggcgacaaatacttacttataagtaactgaagtgttggagatcgagaatctcctgtccatattaaataacccattccaaacatactgaaagaagaggatttttcctaagtcattttaaaatgttagaaatctaataaatgttgctatagttgctataaaaattttgtttttagtattagtttcaatttttatttcttccaaataatttgtgataaaatagtgcaattaattatatcaattcttgtgagaccgatattactgcatttgaaatgatttttttcttatctttattttccaacaaaattaactttaagacgtaagttaagcaaaatcaagtttgtaattagtccaaactctataacatacaagattcaaccttgctacataacgtagatcacatcataaaaccgatcctatgtgaacacatttgtttggccaataaagtaaagtgtaactcttctaccatttatttcctttattttcattattactaggtatacttgtattaaggacggatccagctattgacggggacaagcaggagcctttcctgttagattgttaaacatgagtgtagagatttcgcgtcaagtagaaaagagacatgttaaacacatataagtaataaaaatctcacccaatatttcatatgttagcaaagatcttctaatgggctttttgacaataaaagggtaaaaaaaaatcagtaattatcatatgagatatgagagtagttttaaaattatttatcattttgaaataagtcgggttaagtgatacgacttctaaaaagaatttgtaattctatttatttacgattttactgttcttaatttttttttacgttcaaaagtcgtaattatatttacgagttttttactttcaaactgtaatttttttccttttaaaagtcgtaaaaatatatacgagtttaaagttgtatatatatttacgattttaaagtcatatttttttattttttttttcatcctgcacgactttaaagtcgtgaacaatctcacaactttaaagtcgtgtacattnnnnnnnnnnnnnnnnnnnnnnnnnnnnnnnnnnnnnnnnnnnnnnnnnnnnnnnnnnnnnnnnnnnnnnnnnnnnnnnnnnnnnnnnnnnnnnnnnnnnnnnnnnnnnnnnnnnnnnnnnnnnnnnnnnnnnnnnnnnnnnnnnnnnnnnnnnnnnnnnnnnnnnnnnnnnnnnnnnnnnnnnnnnnnnnnnnnnnnnnnnnnnnnnnnnnnnnnnnnnnnnnnnnnnnnnnnnnnnnnnnnnnnnnnnnnnnnnnnnnnnnnnnnnnnnnnnnnnnnnnnnnnnnnnnnnnnnnnnnnnnnnnnnnnnnnnnnnnnnnnnnnnnnnnnnnnnnnnnnnnnnnnnnnnnnnnnnnnnnnnnnnnnnnnnnnnnnnnnnnnnnnnnnnnnnnnnnnnnnnnnnnnnnnnnnnnnnnnnnnnnnnnnnnnnnnnnntatctatttttaaagtcgtatatatttacaacctttgaatgtaagaaaaaataaaaaataaaaaaatttcagtttaaaagtcgtaaatatgtttatgactttaaattataaatatatttacgacttttgaacgtaaaaaaaattatacataatgaagttataaataaaattacgacttcacttaaaaaaaaacgaaaaaatataaaggtcatgatagactataggacttttgatttacaagttgtaacacgtgacacgacttatcccaaaatggtaaataattttaaagctactcacatatggtaattattgatttttttacccctagtcaaaaagcctcttctgatggtctgcgtgtaatttataaatttttattaaaaatattaattattaatttgttaatttttattattaagaaggatttaaatctatgatatatatatttttttaaatacttttaaccattaaatcaatcctacctatatttccataactttacctataatgtgttacttcatacaattcttaatactgttttttttacttgaaccaaccatactaatatgttgattaaaaaatgnnnnnnnnnnnnnnnnnnnnnnnnnnnnnnnnnnnnnnnnnnnnnnnnnnnnnnnnnnnnnnnnnnnnnnnnnnnnnnnnnnnnnnnnnnnnnnnnnnnnnnnnnnnnnnnnnnnnnnnnnnnnnnnnnnnnnnnnnnnnnnnnnnnnnnnnnnnnnnnnnnnnnnnnnnnnnnnnnnnnnnnnnnnnnnnnnnnnnnnnnnnnnnnnnnnnnnnnnnnnnnnnnnnnnnnnnnnnnnnnnnnnnnnnnnnnnnnnnnnnnnnnnnnnnnnnnnnnnnnnnnnnnnnnnnnnnnnnnnnnnnnnnnnnnnnnnnnnnnnnnnnnnnnnnnnnnnnnnnnnnnnnnnnnnnnnnnnnnnnnnnnnnnnnnnnnnnnnnnnnnnnnnnnnnnnnnnnnnnnnnnnnnnnnnnnnnnnnnnnnnnnnnnnnnnnnnnnnnnnnnnnnnnnnnnnnnnnnnnnnnnnnnnnnnnnnnnnnnnnnnnnnnnnnnnnnnnnnnnnnnnnnnnnnnnnnnnnnnnnnnnnnnnnnnnnnnnnnnnnnnnnnnnnnnnnnnnnnnnnnnnnnnnnnnnnnnnnnnnnnnnnnnnnnnnnnnnnnnnnnnnnnnnnnnnnnnnnnnnnnnnnnnnnnnnnnnnnnnnnnnnnnnnnnnnnnnnnnnnnnnnnnnnnnnnnnnnnnnnnnnnnnnnnnnnnnnnnnnnnnnnnnnnnnnnnnnnnnnnnnnnnnnnnnnnnnnnnnnnnnnnnnnnnnnnnnnnnnnnnnnnnnnnnnnnnnnnnnnnnnnnnnnnnnnnnnnnnnnnnnnnnnnnnnnnnnnnnnnnnnnnnnnnnnnnnnnnnnnnnnnnnnnnnnnnnnnnnnnnnnnnnnnnnnnnnnnnnnnnnnnnnnnnnnnnnnnnnnnnnnnnnnnnnnnnnnnnnnnnnnnnnnnnnnnnnnnnnnnnnnnnnnnnnnnnnnnnnnnnnnnnnnnnnnnnnnnnnnnnnnnnnnnnnnnnnnnnnnnnnnnnnnnnnnnnnnnnnnnnnnnnnnnnnnnnnnnnnnnnnnnnnnnnnnnnnnnnnnnnnnnnnnnnnnnnnnnnnnnnnnnnnnnnnnnnnnnnnnnnnnnnnnnnnnnnnnnnnnnnnnnnnnnnnnnnnnnnnnnnnnnnnnnnnnnnnnnnnnnnnnnnnnnnnnnnnnnnnnnnnnnnnnnnnnnnnnnnnnnnnnnnnnnnnnnnnnnnnnnnnnnnnnnnnnnnnnnnaagtatcaaatttaaaaaaaaaaaacttataaaaatcaaaaacatatttaaatctttttttattataaataacagtgtatttataagaccaataaaatttagtataattaataaataattgaattttttaagcatgttaagagtaattagattttcagattgtaaatatgaaaaaatttgattaagagaggaaaaactcacttctaatctaaatgtgttttgggattaatgttacgacttttatatatcaaaatacattgtattttgcttttcaagaaaggaaaaaaaaacgtgtgttgataagaatcgatacaggaagagtttaaacgaggtgggttacaacttacaagttcgtagttactacgaggacaatggaaaatttgcaatggttgattgatttaaaagaaaaccatgagagtggagagaagagggtaacacaagtgggggcaacttgtataaggaagacagctagcgaagtgaagcatggtggtgacttctgagtcacatcaaacgtaaagtccaaatatgtcaacaaaagtcgcatcaccgtccaatccttatccaccgttgacccctaaacagtgtgccagaaattatgaatgaatgaaagttgcaaaagtattagaaatgtagaataaagcaccaatctactcaaatccaggaaccaatgtctctcatcctccaccttctcgccatttctgatcaccattccatggattattgaactattattatgcttgtttgtatttaaattgtttttaaccatttaatataatcttcattatcatttctctttcattgatcatatatgtactagtactagtatacaacatttaaaatgcactttcttgcagggcatgattggcatcaaatactccttacttcgtgagtctaattgacctaaaatcctggaaggacaaattgtggtgactggtgggtcaaaattacgaacacaactcattatttgatgaaaaataacatgtgactcatatcataaacataacaagtgtaagtgacggtactttttttcagtacatatcataaatatatactccttcttgtcttaattataagtaaaaaatatatatatttcatatttattaaagaaattaattaacttcattaaattatgtgatttctaattaaaaaatatacacttttttaaaattattatttattgaaacttaatattcagcattaaaaatctttagctttaataaataaaaaatattttaaagataatatcattgaataaaatataagtaattataatttgtttatatataagaaatttttgttactgagagatcaaaagtaacatatttcaataaactatagtactttgttttctttaccattttcaaataaattaaccattgtggtggttttgacaactcgcaatataaattaattacatgtacttagatcctttactgtctaagaaagcctaacaagcataaacataagcatttaaatgtctttctatttctttatatagtcgttatttctttttatgccgaagctaattctctccttgaattctaaaattttaataatcattatttttatagctatgtaggtatattggttattattcaaaaaaaaaaaatgcagaatctgggtttttgtcctaacattctaaaatgaattttgttggagattttgctgtctgaggggctcagagcaacctcacagtgtgggctcagtgttcaaacataaattccttcctttctttaatttcctttacccatgcaagacagcctgccaaaatgcccatcattgatgagccaatggcaggaatatacgaccccttcaatactacaataatgtaatcgccaattattttgtctgtatatctatcttcgtatagttgttcatttatgaatatcattaaaaatgaacagcaatatttttatactttttataattaaaagaaaaacatagaacaaagggagagagaatttaaaagtaaattacctaatgtgataaaaaaaaattatgtaaaaaccttataaaatatgcctaaaataataaataattattcttataaatttatgattaggactgtttgaaacatactcctaattttatatgcagtatttcactgaccattttcttctttgaaaaaaataatctaaaaatggattttgaaatactgcaatgaaaagtatccaaatattattaatttattattcaaattcaaatttcgatgacttttattagaaaatcacaagttttgtagttttccaacccgaatttttaatggcgcttcaaaacaatatcataacattaacggctaaacctaatattattgagaaagcatatataatttcattaatttcttatatgttcttctgattttgaagataatttatggtaattaaatctgtgaatttgaagatataagtaggacaatgcttttgccagtttcggtctagatgatttagcattagctaccatgcattttcgggaagatcatatgcaaagcttattcaattagttttaaaatatttttgcttaaagatcaacatgtggcacagaatttataggaatccatgctaaggaaacttcttcctcttctgtcactgcttaattatctgattggcaaacaaggcctcatatatatatctagctagctatggttctttcttcctcctgcaaactcaactgtatacaaattaaattttgactgccaggttcgctatacaaaagcctccctagtttgactaaggctacacattgtacattcatgtagctttcctagcttgccaactaatcaagttggtacagaaaaaccctaaaaagtacatggagttgtcattttctctcccccaacgtcattaatttctttattaactttattaaatatatatagtaaaatatatcctgacttattctcactatatcaacatattttataaagaataaatttaattaattgtctttgaagttttgtaaaattacataaataatactctctgcttttttttaacctttacaataatcttgtgttacacaagctactctggtgtaatattttataaacaattaagatgaattggtgtaatatataaatgagcatgatcagggtatatttttcaaaatttaagaaggattagtgtaggagtaaaaaaaaggaaatatttgtgtaggttcataaaactttaggataattaatgtaatttattctttcgtacactacaaggctgtatttttttgttgacaaacactaccctaactaacatctattgtgaaaagttttgcaacgacttttaaaacataatcataattatttcacaattactattatcatagttaccattccaccaccactattgatacctccattattgttgccatatataaagtatgaacactctttttttggtccaaaatgcatgtcggacacgtgtcggacattgatatacagtcaattttttaggacacgttgagtagggggacacgcgagtttgatcgaatcggacacgtagtcaactttttcgacatatttcaacacgtttttttaaattattttttttttaaattaaaaaattaaaaaaattaaaaaaaacatttgataaaaaattaaaaattcagaaccctttatggataaaaaattaaaaaattaaaacatttgattcacttgaagatgttggagatcttcaagttgccagtctttcacttgatgagtcagagataaaggctatgattattcgagatggagatgaaattaattaaatttgttagtaacactttatggatgttttattatttttgctttatatatattaaaaatattgtttaatatcaaaacgtgtcctaacatgtcgatattttttagaatttacgtgtcagaatgtcatgtcgtgtcgtgtcgtgtgtcgatgttcgtgtatcataggttgccactcccactccattacctttatcaccaacattatttcatcttagagcgagataagataaaatagttcacttattttatttgtttttaaattgtagcatctttttaaaatttaaaaataaagaataactcaaaactcaaaactaaaactgattttatatttgcaatattaatttcgacctattgattttttttatattagtttctacaatattaactaaatctggaattaaaacggctcacaaaaaaaaaaaaacaatggaaagataactaataaaggaagcaagagacaaatgggcctcggcccgtggactcattagaaaattatggcccggtttatttcgcaagcctgatctaagctgggatcactgtcttttcacatcatttagcaatagtatctcaataatgaataactttttttaaaaaaaatctccagaaacaatatttttttttcgtagagaatctccagaaacaaatgaataatcatggtgatttaaaaaataaataaaacaagtagtggtaatttatttcttgctttggcattgattatgtgttgtctaatttctacactcacattcaattctcaaaatgtcatatattttgagtttaatttcattctaacagttttagattttgaactaataaaaactaatattctgtcaaaaaaattaataaaaactactactcaagatagaatttaaaaattatttattataaaaaaataaaaaatcaacaaattcttggcacacacagttagataatgatgatataaattcttggcacacacaattaataaaaactactactcaagatagttttatatttttgtaattttgagtttttcctcaaactaaaagtattgatggttaagaaattaacatatattgatcatgacatagattaaaaagttatctcacatcactaaatttagatcatatgaagttaatttttatcaatcaacattttctgaatttgataaaaaaaaaactaaaattataaattttataaaactggacgattaaatattttattttaaaataaagaaataaaaattatgaaatttaaaaaataaaatgattaaatatttatattttaaaataatgaaatcaatattacatatatttaaaaataggagtaacaaaattacatataattctatattcttaaatattagatggtatttattagaaatacatttttttaatcacacttagagaattggattggcttgcctgaaacaaactcattgcctttttattagaatcacaattaaataactattatgtaatgagaacactggcaaatgcctctaatgcattgatcaaggaattaaaagtgcagaacttttacaaataaatgttaattacatattttcattgtgattttcaatgtaaatctacattcatttttaaacctaattcattatttattgttttttaatttagttgttttaagacactcatgaaaaattcttattttatctactccttttttttgtctacttattcaaaaatttaataatgtgtttatttatattaaaattaatttcaatttattattatatttatagaaagtaaaatattcaacaagtagatagaaataaaaatagaaaaaccatatcaaattaaaaactactaaataaataaataaattttaagaagtagacagataggaaaaaggaaattggagtatagtgatatttttagtcacactttgcgggtaacatcggcatttcattaaagtgcgcgtgcctgtaatttcagggttattttgtggccctctaacctaaacctagggtccaataggaggtatgttgaaagatcgcgtttcaaaagtatgatagttgatgctttttcagtttacaatatgaaatcccaatcaatctctcacatgtatttcagtgtaaattaatcgacaaaacctaaaaaaaacgcttttcgccttgagaattcaaggtctgttatagtggcgcaaatgaaaagctatgtttagttaagaaagaaaaacttaattcacatacaaacaaatcaagtcacttataatttattaagagtgtttaaattgtattatagtccgaatttctttttaaattaatgataaataaatatttttattattttaaatatcctataacagtaacacttctaattttttctatttttctttttatcaaatcaagattttatcatatctatatgaggagtggtaataagacactctttcaaacactcctccataacatttcttcttagtagttaaaatgtattaaaaattataaaatcaagaaagaaaatcaataaatagatttggatccattgaattttgtaataaatttcaatcaataacaaagatatttaaaagagtatgttaaaaattataaccctaacatttatttatctatatttattactctctttctaattctagatgttacataaacgtttggagtgtccattaaattttatttttctttcatgtcattcatgaatgtatgagtgttttagttattaattaaatgatataaacccttttttttaaataaaaatgttatagtatataaattaaataaaaaagtgtgtaaaaataagaatagtttagtctttaattattaatcaccttatctttcaacttttttttttccaaattgaaaggtttgcatttagatatgagtgtcacaaatttatttttctttcacttttaaagtgcaccaaactgtataagtaaagataaaatttctatttccatttatctaatacatcctttttctaccatttcaaacatgatgaattttaccatgcaaaaagttaaacattttttttatggtatgaaaaaaatttaagtcattagatatatttttgcttatttgacagatgtgcaacggctgcaaaggattgagggaggtgtgatggtggtgcaggtttgatagaggtggcttaggattgagaaaagggacgcaaatttgcattagagagggagggttatgtctgaaaagaagaaaaaaaacaaaaaatctaaactaaaaatttaaaactaaaaatttacttttctaccgtaaaaattgtttaactttttacatggtagaattcatctccaaacataccattaatctgctttcgtatatgagagtaaaaataaataaatttagaagacaggttctaggttgtttaatatagaataaaatgagcaaaatatttttatttatttaatattatagaaagttaaagaaaataaaaaaatgtatataaaataacttaaatacatcaaataaaaaataaattgtgatgtttttcaataaaaatgaaatgaaattcattatagaaatactttccttcagtccatgtcatcggtgaaggaatcaataattttatttaataactttaatatttttgttgttttaaagattttcgtttatttaaagttatctggtatttttaaagtataggttacttttagtttgagttgtaaattttattttttaataaaataagagaaaaacttaaaataatattttaaattgaattttaataattttatttatctttcttagatgtaaaaaatatgataataataataataatatattgaaagatgtactatttgtttgatagtactggtttttttaaatttcaataagaaaaggaaaaatcagaggagagagagagagagagaaggaggtcggaaggagacgtaaaggaaaatgatacttggctggctttactgagggcgagaaggcagagaggaaaaaagaaagtaaagagggggagaaagtggtgacactgcagagacacaagtaggatatttgtaataaatttgaataattaaaaaaatgttgctaaaatatatattggtaatttgttaaagtttctataaaataagttaaaaaataagaatttggataaagagtaaaatattagaacatctttaatggtagatcttaaattgagatcttaaatcatgttggatcctataatatcacataagattaaagatctctcaagaattctctaattttttactttaatggtagatctcattttgagattttaaaatgaaaaagagagagaaaatttatttttttaaataatgtgtagatcttctacgatcttgtataaaaatttattttttatattaaagatctttctattttttttaattaaaaaattttataaaaatcatattttaaactcaaaatctttaattaaaatttaccagatgcacttaatagtaacagatgcataatgatggagagtgttattgggtgaagagtaatgagttagttacggtgatagtagtggaaggcagctaaggtagagaacatcaggaggtgcctcgagcccttcaatacatcaatcttcacgcgctttcttttttatcattttatcaagtgggtcccactactcacgccatagagacacccggggggcgcctctctcttacatttccacttgtctactcacctaagctatccatcaattattttgtcattattatataagacaaacttcaacatctccacacgtgtctctttcttcttaatttctccactccaattcaattactaacatattatttctgcatttcttcatctacctcattacattacattacattctccttaaattccattaataaatacactatcatatttattataagatattttatattaaactttgtattacaaattatctaatatttaaaccttttagcaaaattttatttaatatattaaaccattattgttgaatatactatacgaatgtaattaagcccacccatgctttgacccttcttttgtggctgcaaccttttttctttgatgcaatatacaaacatggatgctaaattcttcagactgctttgcacgatgatgggtacctacggctacaatcataataccatacctttttacttcatcaacacgatgatttgtgttattatctattacatccttgcatatctataagatagctcgatcaggacctttgtgaatgtatttaaacaaatactttactgaattggacttattgcaatactcgacgttgtcatgccctccatttcgtataagaagataaggattgtaggggaataacactacgattatctaactttacccccattttcttaacccataaaccagaatcatgacgtttatacttgggataaccttggtcaatgtatgcgcttgtatttgttattttaaattctttttaaaaaacattattattttatcaattatatatacttatatttacttgatttttgtagtcattgtatatacttattatgaaattaaaaggatatagaaatgaagaatgataaattaaaaaaaaacaatatagtattcattagataattaaaaccttaatagtattaaatacaaaaaaaaagataaaattcttaatataaaatgacaatattaattgcatttttagcttttacattccattttgatattatacttaaagtggaaaaaaaaatagaaagtaattaaaaagagggataggtatatgtacccgttcggtccatttaaggtccgacttgcgaaacctgtattttatatgggtcagacaaatctgatctattaaataaatgatcttatttttatgatttgtatctagtctataaaagtctgcgaataaatggattaatcaactagtcgtaataaaaatttgnnnnnnnnnnnnnnnnnnnnnnnnnnnnnnnnnnnnnnnnnnnnnnnnnnnnnnnnnnnnnnnnnnnnnnnnnnnnnnnnnnnnnnnnnnnnnnnnnnnnnnnnnnnnnnnnnnnnnnnnnnnnnnnnnnnnnnnnnnnnnnnnnnnnnnnnnnnnnnnnnnnnnnnnnnnnnnnnnnnnnnnnnnnnnnnnnnnnnnnnnnnnnnnnnnnnnnnnnnnnnnnnnnnnnnnnnnnnnnnnnnnnnnnnnnnnnnnnnnnnnnnnnnnnnnnnnnnnnnnnnnnnnnnnnnnnnnnnnnnnnnnnnnnnnnnnnnnnnnnnnnnnnnnnnnnnnnnnnnnnnnnnnnnnnnnnnnnnnnnnnnnnnnnnnnnnnnnnnnnnnnnnnnnnnnnnnnnnnnnnnnnnnnnnnnnnnnnnnnnnnnnnnnnnnnnnnnnnnnnnnnnnnnnnnnnnnnnnnnnnnnnnnnnnnnnnnnnnnnnnnnnnnnnnnnnnnnnnnnnnnnnnnnnnnnnnnnnnnnnnnnnnnnnnnnnnnnnnnnnnnnnnnnnnnnnnnnnnnnnnnnnnnnnnnnnnnnnnnnnnnnnnnnnnnnnnnnnnnnnnnnnnnnnnnnnnnnnnnnnnnnnnnnnnnnnnnnnnnnnnnnnnnnnnnnnnnnnnnnnnnnnnnnnnnnnnnnnnnnnnnnnnnnnnnnnnnnnnnnnnnnnnnnnnnnnnnnnnnnnnnnnnnnnnnnnnnnnnnnnnnnnnnnnnnnnnnnnnnnnnnnnnnnnnnnnnnnnnnnnnnnnnnnnnnnnnnnnnnnnnnnnnnnnnnnnnnnnnnnnnnnnnnnnnnnnnnnnnnnnnnnnnnnnnnnnnnnnnnnnnnnnnnnnnnnnnnnnnnnnnnnnnnnnnnnnnnnnnnnnnnnnnnnnnnnnnnnnnnnnnnnnnnnnnnnnnnnnnnnnnnnnnnnnnnnnnnnnnnnnnnnnnnnnnnnnnnnnnnnnnnnnnnnnnnnnnnnnnnnnnnnnnnnnnnnnnnnnnnnnnnnnnnnnnnnnnnnnnnnnnnnnnnnnnnnnnnnnnnnnnnnnnnnnnnnnnnnnnnnnnnnnnnnnnnnnnnnnnnnnnnnnnnnnnnnnnnnnnnnnnnnnnnnnnnnnnnnnnnnnnnnnnnnnnnnnnnnnnnnnnnnnnnnnnnnnnnnnnnnnnnnnnnnnnnnnnnnnnnnnnnnnnnnnnnnnnnnnnnnnnnnnnnnnnnnnnnnnnnnnnnnnnnnnnnnnnnnnnnnnnnnnnnnnnnnnnnnnnnnnnnnnnnnnnnnnnnnnnnnnnnnnnnnnnnnnnnnnnnnnnnnnnnnnnnnnnnnnnnnnnnnnnnnnnnnnnnnnnnnnnnnnnnnnnnnnnnnnnnnnnnnnnnnnnnnnnnnnnnnnnnnnnnnnnnnnnnnnnnnnnnnnnnnnnnnnnnnnnnnnnnnnnnnnnnnnnnnnnnnnnnnnnnnnnnnnnnnnnnnnnnnnnnnnnnnnnnnnnnnnnnnnnnnnnnnnnnnnnnnnnnnnnnnnnnnnnnnnnnnnnnnnnnnnnnnnnnnnnnnnnnnnnnnnnnnnnnnnnnnnnnnnnnnnnnnnnnnnnnnnnnnnnnnnnnnnnnnnnnnnnnnnnnnnnnnnnnnnnnnnnnnnnnnnnnnnnnnnnnnnnnnnnnnnnnnnnnnnnnnnnnnnnnnnnnnnnnnnnnnnnnnnnnnnnnnnnnnnnnnnnnnnnnnnnnnnnnnnnnnnnnnnnnnnnnnnnnnnnnnnnnnnnnnnnnnnnnnnnnnnnnnnnnnnnnnnnnnnnnnnnnnnnnnnnnnnnnnnnnnnnnnnnnnnnnnnnnnnnnnnnnnnnnnnnnnnnnnnnnnnnnnnnnnnnnnnnnnnnnnnnnnnnnnnnnnnnnnnnnnnnnnnnnnnnnnnnnnnnnnnnnngctagtaaaaggagataaacaaattataagatctacaaaattaagttaaatatttgagtgaatttttgtgaagaatgcttaaatctatatcacattataaaatctataaaatagagataaacaagccatttaacaatgatcctctatcattagtgtattcctaactaatatgaaacatcttaccacactcttcatgcctaaaattgatgccatattgtgctgattgctgaatcaattgttctaaaatccttaattcgtttaatgaatgcacaaataattttaacactcccccacataagaatccattaagtttaaaatatagataatgcataaataataacatggaaaagaaattgtccttttcctctaaaactgatcgaaatcaattcgccaacaagaatacaaaggaacgtggatttgtacccgaacaataaagaacttgcaaatttgcatgtagatgatgctacattaaaatcacctacgatggtctataaagtgtagtagtttgtagagtggtccctcacataaatatcaatagcagagaaaaagtctgggcttgtttgcttggttcagtagactcagtacagacccctacgcacacctactctctcttttatgtaatctcactgtcattgctcaaatcttcagaaccctacccctcatcttttcccagccattcacatcaccattttttttatactaattttattctttaaataccagatactcagataattcacttgacaccatctataaagtgtataatataacactacccatccccacctatatatcttcttactgtatactcaattttcaaactttcttaatatttcacaaaataaacacttaatgaaataacacacattcaatttttcttcatgggcataaacacattcaaatatttttctatttattaagttggaaggtttgaaaaaatacattgtaaaaatattattaaagatttcatattaactagtgatatgaataaaaataatattaactagtgatatgaataaaaataatattcataataaatgaaaaataacctttattttattctgcattatttttgcagttgaattggattcaaatctacaattgaatatgatattatagtatattttaaaaatgttgttaggtttatttgttgttaaatatatcggatcacttagactcactgcatgttcaacttgtaaattttatgttcataatattcagccatcaacatgagaaaaaagaacattcacttataaagtagtttttggagttaaattaatcctaaactgaaatttttatattttttnnnnnnnnnnnnnnnnnnnnnnnnnnnnnnnnnnnnnnnnnnnnnnnnnnnnnnnnnnnnnnnnnnnnnnnnnnnnnnnnnnnnnnnnnnnnnnnnnnnnnnnnnnnnnnnnnnnnnnnnnnnnnnnnnnnnnnnnnnnnnnnnnnnnnnnnnnnnnnnnnnnnnnnnnnnnnnnnnnnnnnnnnnnnnnnnnnnnnnnnnnnnnnnnnnnnnnnnnnnnnnnnnnnnnnnnnnnnnnnnnnnnnnnnnnnnnnnnnnnnnnnnnnnnnnnnnnnnnnnnnnnnnnnnnnnnnnnnnnnnnnnnnnnnnnnnnnnnnnnnnnnnnnnnnnnnnnnnnnnnnnnnnnnnnnnnnnnnnnnnnnnnnnnnnnnnnnnnnnnnnnnnnnnnnnnnnnnnnnnnnnnnnnnnnnnnnnnnnnnnnnnnnnnnnnnnnnnnnnnnnnnnnnnnnnnnnnnnnnnnnnnnnnnnnnnnnnnnnnnnnnnnnnnnnnnnnnnnnnnnnnnnnnnnnnnnnnnnnnnnnnnnnnnnnnnnnnnnnnnnnnnnnnnnnnnnnnnnnnnnnnnnnnnnnnnnnnnnnnnnnnnnnnnnnnnnnnnnnnnnnnnnnnnnnnnnnnnnnnnnnnnnnnnnnnnnnnnnnnnnnnnnnnnnnnnnnnnnnnnnnnnnnnnnnnnnnnnnnnnnnnnnnnnnnnnnnnnnnnnnnnnnnnnnnnnnnnnnnnnnnnnnnnnnnnnnnnnnnnnnnnnnnnnnnnnnnnnnnnnnnnnnnnnnnnnnnnnnnnnnnnnnnnnnnnnnnnnnnnnnnnnnnnnnnnnnnnnnnnnnnnnnnnnnnnnnnnnnnnnnnnnnnnnnnnnnnnnnnnnnnnnnnnnnnnnnnnnnnnnnnnnnnnnnnnnnnnnnnnnnnnnnnnnnnnnnnnnnnnnnnnnnnnnnnnnnnnnnnnnnnnnnnnnnnnnnnnnnnnnnnnnnnnnnnnnnnnnnnnatggtccagttttgtttttcctttactttaagatgctcacgaattgataatgcaactcatattatctttgtgtatgagcattggctatatatgttttatatttgaatgacacacgcaaaacttttattttatttcacatgcttaccaaattctaacattgcatcattcattttttttttctttcttttaattttatttttactatctaaattctcaacctctaatgtctacatatcaattatactgaagacggatcaacttaattgtcaaaagagtatcgatcttttttagaattacttttcatttttattatttattttcttaaaattcaatgataattataaataattaatcctaatcattaaatttataaaaaaaatcaataattaagataaaaaaaagtaaaatacaagaagcaatcaatccatatacagaatacacaacagacaccctgtcaataataaggttctaccctaagcacttgcagcccttcaaacaacatagagaagtgttctattcaagaaaagcatatgcctagctatagccacatcatgcatccactatgacattacaaccccttcaaacattccatgggatatattgaccactcataaataaacaacaaaagagaattccttcaccctgtttgatagtcatacccaagatctaaatttagttaattccaaggtacatgttcagtattaatgataattattgttgaaaataatgttcattatatggggtaaaggcatggaagactcgaaggaccacactaggatgcactgaattatttggttcagtacctgctgggtcaagcttatttaagcgtgtaacaatggctaaattaaatggcattaaaacaaaaatcttctggttaatataatgcatataatttcctttcagcctttcctttctttggagtttggacccgctatactgaggtagacacgtactgaattaagcctctaattaatttgacaaagaggattttctccttcgctgtgtctttgctgattgattaattttttttattaataaatattaatttgttaattttgttaaaaatatcagttacaatctctcattcctttcttctttctttcttcttccttcatattttcccaattaatgaatcaaccttatatctccctcccttgttgttcaatgcatatataacttcctacactttttgcttccacgcaaggttagttaccagtactcgacacattatcttttgatctttttataggttaacgtttggatatctaaaatatgtagctacataatattacgggatacaagtagaatgcaataaaattaccaaagacggaatgaaataaaaatttattagtttataaactatcccgttatacattgaatggatgacacaatatccatttttattagtttatttatatgttatcctatttaaaagaatgttgtcactcctatttcacattcttgcaataaagaaaaagatcgataaaaagaaaaggagagaagtgtaaggtgataaaggaaaatgcgcagaaaaaaatgttatgaaaatgtgaaataaagtatttgtatataataaattatatatatatannnnnnnnnntatataataacaactactatgatctatttaatttccatctatttcatttattaatttctaacataacataggttttataggacaaggggaaacctaggtacgtcttgggctaggagaaagtcctaggctcttgacacactatatatatgctttccagatgctcaatttttgagagtctactgggtgtgtatatatatatatatgagggcttcctgatcagaagttaagtttcctcaagggttcaattctttgcaaaactgatgatgtcttttacaccaagttcctcatctcaagacaccttggtgtagctctctatctatgttttcatcaatatttatgtttagaaactgtaactgactgtctaatagaattctaaaatgattcatgaacacttctcgtctatttaatttgacacttggtgagaaagagaaaagaaagaggaaagtatatgcataataagtaatattatgtgataaaaaagagagagaaataaacagaaacaatgagtgttaatcagctgtttcatgtcaaagtgtccacatctatatatactatccttcaatagaatttgtaattaattttttgtctctatctcactccttatcaatgagcagcaaatttttttctgtagttatttacacacggaagccgaatatatgaatcacaaaacttagagaaaatgaccttataattgagagggagagatctagagaaatgaagaaatagatgagtgtgtaaagaaaggtctgcgatctatattatttctagctgtgtaaataccacgagtctaacttttttaaaccactctgcagcaaaatttcttcaacttgcaattgatataaatacaaatgaatatatagttagtagtcacaaagtaagatatatataattaaacatgacttagaattggggaacaattgcaagtttataaatgcaagcttcactttgtacatcaactaagaaatgcattaaacaactcagaaaaagttgaaacaattaatttccataatatcattcacaaaattataaacaaccaggaaaaagaaaacgagtggctaattattcctgaaaggccagaaagaaatataattaatgtatatatcagtgtacaaattgatgttttgtgtgtgtggagtacttctaattaatcaagaaaattgaactacatagtaaacatttccacgggcttttctttttctttccactctaaccctatgaatctgcatggcgaaaacctaatcttgtattccgaaatggtttcaagcttaggagaccacacctgatccttagacttcacaagctgttcatagtgcttttgcaactcaggagtactacacagaaaactagaggggctaccaggggttgttccaacaccattattctctttgttgtgatctccaccacttatgagcctagtgatgaactcaggcatgaccttaatagcaacccttccatcagaacccttcaagtactgaaaagggcatgcaccaaacttgataggggacttgttagggcaagatccaagggcagaaatggaagccacagtgaggttgttgcatgcaaagagatcaatggggagaacaaagtaggtttggccaggcatgagtttatcatctatggagagaacaggaattggttgtccaatgaagaaagagtctgcatggcacaccatcatttcagggaactcaaacatgatctcaccagctatgtgtttccctttaagggatcttgatgttccttcccaaaatatgagcttcacggattttgatgatgatgatgaattggtgttgagttgaaagcatggagtcttcaatgcgtttcccatttgaataagagagaataatagagagagagaagtggtgcaagctagctgcttagacaagaatatgatgaagagattatatatatatatataaggatatattataatgttgactttggataaaatagtgtggtcctaattttatttcattatgtttttggtacaattaattaaaaagtttgatggggtcggtgcggtggtctggtcagccatgccggctttgaaaacttcactttctatatcgtgatgtgtgtgggatcttttaggacacactcttgtgccaggctctatagcaaaaacaactcatacacgaacttcacaagcttaacccttgaccttgcgtgccttttactatttatattcaaacctagttggttaccctttttctcctcccattaatataatgcacaggactataggaggagtatttagggttttactcttttaggggtgaagattaattcatgaatgtagatatttttgttcttataaagacctaaaagaaatataaaaaaaaatgttaaaattcttactttgttattaactgcgtatgaatagtcggcactttatacggtccagcgtgggggacgaaagtacaattatacaattaaagactaataaattaatttcatatcttaaaggttaaaaggcgttggaaattaaaaaaattccctcaggcagaagacgtgtacgccgtttttgttataaaaaaaaaaaaaatcctgtagagttagtaaattttgatcaaccatatataattttgatcttggattaaaattataacacaaattaccgaattacaaaagattttacatatgcttgtatattataaagtgaaaataattcatatactaatattatgaataatttttataatttcatttaatcaaaaaccgtgggtataataattctattaacttttatgacaattacttaagtcatatttattatcttttcatggttgagacgactgtaaaaacttctacagtatcgatgcatagaacttaaataatattataaattagaatttttaatttatttatcctaaattataattataattatataaattttttcatattttataaaatgaacagaatgattaaaatactacttcaaagaaaagcagtttaattataaaaaaaatcaaacctagctaaattctctggtttatcttcactacttgaaactcaagtaacattttttttgggtgctcaaactcaagtaacatataacatatacttattttgatatagaaatttaatcattatccaaagaataagttagatccaatcatctcatttttttggataaaattaaccaccgtattactctgtcatttgtgccaacgtcatcgaaaatatgacctaaccaatcatccgcgaaggcatctctaagtttgaatttgttgactctatctaatccgtgatttgagctttaaaattttgttgattttaaatctaataaacccaactaattcatttaatattcataatttaaggagtgactaatatatatttcaaaatcagtaggtgttcgtttggttctttcaaactaaaattaattggttcgcaagcaagttcccttcgtcataggctgatattaatcgaacccaagttgtcggcttaagatcaaccttgtgactttcacgtgtcaatttgctgcttttttttatattatgtaaatgtatagtcaaattgcaggctataattatataatccgtttaccatttttatgccttcgatagatataatagaagcctattattaacgtaattagtttaaaaatttgtgaaggaaaataatatttccattgtttatagatattcttacgaattaaaaagaagtttatctcaaagacttaaagaagttcgatttactaattttctctcattttctattttgtttgataaattgttttagcctttattaaataacgtcgacccttttcgtaagtcacctttcggataataagtgaactcatcaaaaataaatttgtagnnnnnnnnnnnnnnnnnnnnnnnnnnnnnnnnnnnnnnnnnnnnnnnnnnnnnnnnnnnnnnnnnnnnnnnnnnnnnnnnnnnnnnnnnnnnnnnnnnnnnnnnnnnnnnnnnnnnnnnnnnnnnnnnnnnnnnnnnnnnnnnnnnnnnnnnnnnnnnnnnnnnnnnnnnnnnnnnnnnnnnnnnnnnnnnnnnnnnnnnnnnnnnnnnnnnnnnnnnnnnnnnnnnnnnnnnnnnnnnnnnnnnnnnnnnnnnnnnnnnnnnnnnnnnnnnnnnnnnnnnnnnnnnnnnnnnnnnnnnnnnnnnnnnnnnnnnnnnnnnnnnnnnnnnnnnnnnnnnnnnnnnnnnnnnnnnnnnnnnnnnnnnnnnnnnnnnnnnnnnnnnnnnnnnnnnnnnnnnnnnnnnnnnnnnnnnnnnnnnnnnnnnnnnnnnnnnnnnnnnnnnnnnnnnnnnnnnnnnnnnnnnnnnnnnnnnnnnnnnnnnnnnnnnnnnnnnnnnnnnnnnnnnnnnnnnnnnnnnnnnnnnnnnnnnnnnnnnnnnnnnnnnnnnnnnnnnnnnnnnnnnnnnnnnnnnnnnnnnnnnnnnnnnnnnnnnnnnnnnnnnnnnnnnnnnnnnnnnnnnnnnnnnnnnnnnnnnnnnnnnnnnnnnnnnnnnnnnnnnnnnnnnnnnnnnnnnnnnnnnnnnnnnnnnnnnnnnnnnnnnnnnnnnnnnnnnnnnnnnnnnnnnnnnnnnnnnnnnnnnnnnnnnnnnnnnnnnnnnnnnnnnnnnnnnnnnnnnnnnnnnnnnnnnnnnnnnnnnnnnnnnnnnnnnnnnnnnnnnnnnnnnnnnnnnnnnnnnnnnnnnnnnnnnnnnnnnnnnnnnnnnnnnnnnnnnnnnnnnnnnnnnnnnnnnnnnnnnnnnnnnnnnnnnnnnnnnnnnnnnnnnnnnnnnnnnnnnnnnnnnnnnnnnnnnnnnnnnnnnnnnnnnnnnnnnnnnnnnnnnnnnnnnnnnnnnnnnnnnnnnnnnnnnnnnnnnnnnnnnnnnnnnnnnnnnnnnnnnnnnnnnnnnnnnnnnnnnnnnnnnnnnnnnnnnnnnnnnnnnnnnnnnnnnnnnnnnnnnnnnnnnnnnnnnnnnnnnnnnnnnnnnnnnnnnnnnnnnnnnnnnnnnnnnnnnnnnnnnnnnnnnnnnnnnnnnnnnnnnnnnnnnnnnnnnnnnnnnnnnnnnnnnnnnnnnnnnnnnnnnnnnnnnnnnnnnnnnnnnnnnnnnnnnnnnnnnnnnnnnnnnnnnnnnnnnnnnnnnnnnnnnnnnnnnnnnnnnnnnnnnnnnnnnnnnnnnnnnnnnnnnnnnnnnnnnnnnnnnnnnnnnnnnnnnnnnnnnnnnnnnnnnnnnnnnnnnnnnnnnnnnnnnnnnnnnnnnnnnnnnnnnnnnnnnnnnnnnnnnnnnnnnnnnnnnnnnnnnnnnnnnnnnnnnnnnnnnnnnnnnnnnnnnnnnnnnnnnnnnnnnnnnnnnnnnnnnnnnnnnnnnnnnnnnnnnnnnnnnnnnnnnnnnnnnnnnnnnnnnnnnnnnnnnnnnnnnnnnnnnnnnnnnnnnnnnnnnnnnnnnnnnnnnnnnnnnnnnnnnnnnnnnnnnnnnnnnnnnnnnnnnnnnnnnnnnnnnnnnnnnnnnnnnnnnnnnnnnnnnnnnnnnnnnnnnnnnnnnnnnnnnnnnnnnnnnnnnnnnnnnnnnnnnnnnnnnnnnnnnnnnnnnnnnnnnnnnnnnnnnnnnnnnnnnnnnnnnnnnnnnnnnnnnnnnnnnnnnnnnnnnnnnnnnnnnnnnnnnnnnnnnnnnnnnnnnnnnnnnnnnnnnnnnnnnnnnnnnnnnnnnnnnnnnnnnnnnnnnnnnnnnnnnnnnnnnnnnnnnnnnnnnnnnnnnnnnnnnnnnnnnnnnnnnnnnnnnnnnnnnnnnnnnnnnnnnnnnnnnnnnnnnnnnnnnnnnnnnnnnnnnnnnnnnnnnnnnnnnnnnnnnnnnnnnnnnnnnnnnnnnnnnnnnnnnnnnnnnnnnnnnnnnnnnnnnnnnnnnnnnnnnnnnnnnnnnnnnnnnnnnnnnnnnnnnnnnnnnnnnnnnnnnnnnnnnnnnnnnnnnnnnnnnnnnnnnnnnnnnnnnnnnnnnnnnnnnnnnnnnnnnnnnnnnnnnnnnnnnnnnnnnnnnnnnnnnnnnnnnnnnnnnnnnnnnnnnnnnnnnnnnnnnnnnnnnnnnnnnnnnnnnnnnnnnnnnnnnnnnnnnnnnnnnnnnnnnnnnnnnnnnnnnnnnnnnnnnnnnnnnnnnnnnnnnnnnnnnnnnnnnnnnnnnnnnnnnnnnnnnnnnnnnnnnnnnnnnnnnnnnnnnnnnnnnnnnnnnnnnnnnnnnnnnnnnnnnnnnnnnnnnnnnnnnnnnnnnnnnnnnnnnnnnnnnnnnnnnnnnnnnnnnnnnnnnnnnnnnnnnnnnnnnnnnnnnnnnnnnnnnnnnnnnnnnnnnnnnnnnnnnnnnnnnnnnnnnnnnnnnnnnnnnnnnnnnnnnnnnnnnnnnnnnnnnnnnnnnnnnnnnnnnnnnnnnnnnnnnnnnnnnnnnnnnnnnnnnnnnnnnnnnnnnnnnnnnnnnnnnnnnnnnnnnnnnnnnnnnnnnnnnnnnnnnnnnnnnnnnnnnnnnnnnnnnnnnnnnnnnnnnnnnnnnnnnnnnnnnnnnnnnnnnnnnnnnnnnnnnnnnnnnnnnnnnnnnnnnnnnnnnnnnnnnnnnnnnnnnnnnnnnnnnnnnnnnnnnnnnnnnnnnnnnnnnnnnnnnnnnnnnnnnnnnnnnnnnnnnnnnnnnnnnnnnnnnnnnnnnnnnnnnnnnnnnnnnnnnnnnnnnnnnnnnnnnnnnnnnnnnnnnnnnnnnnnnnnnnnnnnnnnnnnnnnnnnnnnnnnnnnnnnnnnnnnnnnnnnnnnnnnnnnnnnnnnnnnnnnnnnnnnnnnnnnnnnnnnnnnnnnnnnnnnnnnnnnnnnnnnnnnnnnnnnnnnnnnnnnnnnnnnnnnnnnnnnnnnnnnnnnnnnnnnnnnnnnnnnnnnnnnnnnnnnnnnnnnnnnnnnnnnnnnnnnnnnnnnnnnnnnnnnnnnnnnnnnnnnnnnnnnnnnnnnnnnnnnnnnnnnnnnnnnnnnnnnnnnnnnnnnnnnnnnnnnnnnnnnnnnnnnnnnnnnnnnnnnnnnnnnnnnnnnnnnnnnnnnnnnnnnnnnnnnnnnnnnnnnnnnnnnnnnnnnnnnnnnnnnnnnnnnnnnnnnnnnnnnnnnnnnnnnnnnnnnnnnnnnnnnnnnnnnnnnnnnnnnnnnnnnnnnnnnnnnnnnnnnnnnnnnnnnnnnnnnnnnnnnnnnnnnnnnnnnnnnnnnnnnnnnnnnnnnnnnnnnnnnnnnnnnnnnnnnnnnnnnnnnnnnnnnnnnnnnnnnnnnnnnnnnnnnnnnnnnnnnnnnnnnnnnnnnnnnnnnnnnnnnnnnnnnnnnnnnnnnnnnnnnnnnnnnnnnnnnnnnnnnnnnnnnnnnnnnnnnnnnnnnnnnnnnnnnnnnnnnnnnnnnnnnnnnnnnnnnnnnnnnnnnnnnnnnnnnnnnnnnnnnnnnnnnnnnnnnnnnnnnnnnnnnnnnnnnnnnnnnnnnnnnnnnnnnnnnnnnnnnnnnnnnnnnnnnnnnnnnnnnnnnnnnnnnnnnnnnnnnnnnnnnnnnnnnnnnnnnnnnnnnnnnnnnnnnnnnnnnnnnnnnnnnnnnnnnnnnnnnnnnnnnnnnnnnnnnnnnnnnnnnnnnnnnnnnnnnnnnnnnnnnnnnnnnnnnnnnnnnnnnnnnnnnnnnnnnnnnnnnnnnnnnnnnnnnnnnnnnnnnnnnnnnnnnnnnnnnnnnnnnnnnnnnnnnnnnnnnnnnnnnnnnnnnnnnnnnnnnnnnnnnnnnnnnnnnnnnnnnnnnnnnnnnnnnnnnnnnnnnnnnnnnnnnnnnnnnnnnnnnnnnnnnnnnnnnnnnnnnnnnnnnnnnnnnnnnnnnnnnnnnnnnnnnnnnnnnnnnnnnnnnnnnnnnnnnnnnnnnnnnnnnnnnnnnnnnnnnnnnnnnnnnnnnnnnnnnnnnnnnnnnnnnnnnnnnnnnnnnnnnnnnnnnnnnnnnnnnnnnnnnnnnnnnnnnnnnnnnnnnnnnnnnnnnnnnnnnnnnnnnnnnnnnnnnnnnnnnnnnnnnnnnnnnnnnnnnnnnnnnnnnnnnnnnnnnnnnnnnnnnnnnnnnnnnnnnnnnnnnnnnnnnnnnnnnnnnnnnnnnnnnnnnnnnnnnnnnnnnnnnnnnnnnnnnnnnnnnnnnnnnnnnnnnnnnnnnnnnnnnnnnnnnnnnnnnnnnnnnnnnnnnnnnnnnnnnnnnnnnnnnnnnnnnnnnnnnnnnnnnnnnnnnnnnnnnnnnnnnnnnnnnnnnnnnnnnnnnnnnnncaatgtttcccatgtctaatacaagtcaattagaaacaatttagcatgtcatctttagacaaagcaatgatatgatgtcgttagattaatagactaaaatccctgtggccaaattgtgggtcgttcttggtaccttcttgatggggataatgggggatgattgtcttaatcacatataaaccattttaccttggagatcaatggggtggcttgtgtttaagcattcgatttaatatatttttgggtttggttagcattatgctttgagttatcgtaataatattgttatttttgtgagttaattagttatcttaatattgtttgatgtcaaatgaacttataactattttgataattaatagtaaatgttttttatttattttaaattaatatttttttatgcataggaattaaagatggatagagagagacagtttataataactcatataatctgtttaaacaattgaattagactagttggtatagtataatatgtgaatataattaattgttgatatatataattgtttttagaatatatgttgttcaacatcatttagtttataatataattatacttgtaatatttaatttatatatgtgatcaaactatggaatcgatcaacatattcttaatcattattatgtatcaccagagaatagagatgaccacataggattaggatctacaaaaatgatcttatcaaaatattatagcttcagcctcttaaatgtgaacccgtacaacttatcaaaattataatccttattggctgtagttgttacgacacatatgttagttcttttttcaagagttacattgaatttataaactataaacaatatactcgttattttaaattttaaaccagataaacattttcaggtaatttcatttttcagacacacgtataccgtcacgtatatgtgttttaagcaatacaaaaatacattgacatttaaatatttaagacatatagcaatgcttatatcatccaagagtaagcaaattaagctgaaaggatgatatataccaccccatgtgttctggtcataatccatttgtcgttgcttctaatttgaaggcttttgaatacttcaattatcatgatatcatcccactcaacaaactacatgtccatatacattccggatcatgattcctacgtgcattaatctcaccattcaaacgggcataatgatgaaaatccgacattgatcattcctttctcaatatgattattaatagttaataataaaaattagaaagttgggtgtctgcgctagtttgttgtctgaaatggaatatgattttttattttgtttaaacttgaagggaaaggtgaattgatccattctttaaaaggaagatttagtcattacattgcatcattcctgcccttcaaattataatctggtctgctcaaatggaaggcagacaaagaaagcaaagccaaaacatagcatcatttattcacttttattacattttcttaaatcttttaaatgggttgagccaattctgctcgctgaactaagatgaagaactaatttatctgactttatccaaatttctcacggactatatttttgttctgactgagctcgtaggctcattgagctgggccaaattaatatcttttttttaatctaaatttgtatgaattttaaaagaaaaaataatatcaagccaaataaatcctaatagttttcgaaatttaatttggtcagggctaaaacttcatcatgcactctacaaattttctaccaacactcactttcattacaggaaggatatttctgaatgtatttttacagtctagattacctttttccgtaatgaaatggggtattggcgaaaaaaatttagagtgtaaaatgaaactcatcctaaccagtgtggttcattgagccgaattgatccaattctttttagacctctacgggtccgctagttgttaagggccttgatcttaaatttaaacatcaaaaaaatcatttttcttgcatgaataagaaaaacataactaccaccaaaattttgatggttaaccttaaatttatagacgagttattttctttttatgattattatatgagttattgcatcttacaaaataatatagaacttcaattaatcatcatcattattatgattgtcataaatagagtaattagtgtgtgtctgctaacattagtatatttaaatagtttcacgatgcaatacatcatgaattagattttaaattgcataatttttctatagacaaaatttgtcatatgataccttttagcataacagttacattgatgaagctttaatatttgaaaaaagtcatgatagatataattttgcctactttgacacttaatgtaaatatacataatcatcaagataatactatataattcaataaaatagataaaacttattttataacatattaaagacgttattttacagtgttacacacactcacaccactatatttaataactctttgcatgatcaatggctgaacaatctctacattttgtatcatatctttgatccttcatatatgcagagagagagagagagagagagagagacgcacacatatagcatgtagacaattcttaataagggtagtagggactgataagaagcagagacataaatgattaaaacattgacaactgaaatttaaacaacttccatagtttatcacatagtacgtgtattttatcgtaatctcaaccattggttacaattgcacttttatcctctaaagtgcacagttttgtttcagaggaattaaatccaactatccaagacagcccgtggtagctcattagaactaaatagcatgctactgctggcatgtgtacatcatgcaaatgtgttaaggaaagtgctagctgatttgcttatgtaatgatgttgctgaagttcctcgtaccaagtgtggacttcaaacagatcacaatctcccgaaacatcaaatgtgtgaagagtatgtatatttaatatgacggaaaaccataccacaaaagttagttattatagttggagagagtccaaagccccataaaccttacattagaatcccataggactcaagttccacaccttgaaattggaccccaacattccaccacactccacaggccacagcccctgcgcccatgtgggtaggctatgcactagctctggtcaaacactgtaatgccatcattgcaaccagcaccacttgtttgcagctgggagacataatataaggctctgatacaattgatgagaaccttagaagaaccacaacaccaaaactagttgtagttataaatcccacactaaaatgtcatacttccaatatggaactcaagtctcataccttgcaattggatcctaacttccgaagtcctaacagactgtttctaggatttgaatctatggccttcaagtcacaatgcagatgcaattaatgtgccaatagattacatccctcttaaccagtggatataccaacacttaaacaatacggaaagagttcaaaattgggaaagcaatttcatgtggatcgtcttcaaaaatcacaaaaaaaaatctacaatttgttgcctcaatttctaactgtcaaaaagtataccccaatgatggatatgattatatcagtctaaccaaccacagtcaattccacatcatttctgtgtatctgttaaataaactttaattggaatgtgattgttgtattaaaactaacttgaaccagaccttaggtggtaaccagtgaccactctcatgctacttgagagcaagaaaaaaagaatgcttcaactcccatgctacgcttcataattgcaatgacttccaggcttccccttcaataaattatacttacaaaaacattagtctgaagttcatgaaagatggtggagtcccccacctagctcctgcaaaccatgcttagaagttagaaacatggacaggttgcatttccaagcatctaaaacatacaggattcttcggttcaaattgaaagttgcaagatagaatctcattgtttaattaaatacaaaaaaaatatatataaatcatgtctgataacctaagaactattattctgtattacatctataagcatgaaacaagcaacatcaaggcattcaaaattgcacagttataaaaaaacgagaaaggagtgtctccttttttctttgttactaacctgggcaggaaggctcaacttttatgtttgggctcagaagacatcaaccagggttgtgcttcctgtgatatacagaaccagaaccagtgtggcataggcatagtctacaactagacctaataacacataacaaatatacatctgaataagtaaaattatcataagaatacaaaatcagtgcttacaacagaatgaggcaaacttagatgtcaccaaacgaaagaatatccaaccttttatatcaggtatttgtaacaagagctgcagcggtaaaagcatcagaatttgtcatctggcacaaatcccctttgcagcatttcatcgtggaaacggaatgcttctttcaagttgtctagagatacatgcccatttatcaatgatgtgtatgttgatttatcaggattgatgccacagtcaatcatcttgcataataccatctcagcctcccgcattctgccttgcctacaatatccaccgagaattgcattataagtgatgacatctggcagtagccctttttcttccatgttattaaccaagacaaaagccctgtcgaaattctcttcctttacaaaaccatttataagagtattatacgtaatgcaatcaggagaaactccttccaaaatcatcttttccaagaagtcatttgcctttaacacattgccagcccgcaaatggccctttataacagtgttgcaagtaaccaaagtgggcttaacacctttttctatcatttcatcccacaccctgaatgcctcacccataagtcctaaactgcaaaacccatttatcaaaatgctaaacgatacgtagttgggcaacatccccctgctcaccatatcacgccacaactccttagctttctccatttcaccaatcttgcaaaagccatccatcaatgtattatatgtcacaacatcaggcttaaggctcctttgagtcattgtctcaaacaaaccaagcgccctactcatgttcccatccttgcaatacccatgaatgagagtggtaagggtatagtaatctggaaaaactcccctctccaccatctccttaaacaactcgtcggcatcaccaagcatcttccccctacacaacccattcaacagagtattatacgtaaccacatccataacacaacccttttcaaccatctcgttccgcatgttcaacgcctcagtcacattgccattcctgcaatacccgtcaataagaatggtataaatcaccgtatcagcaaccaacccagcacccttaatcttcccaaaatactccaacgccttgtggaagcgcccgttcctggagaacaccccaatcacagatccaaaactaatcaaatcaggaacaactccgtaccgcaacatttcatcaaaaaccttctcagcctcacaaacatcatccttcctacaacattccacaagcaagggattaaaagtggcagcatcaggactcaaccccatccccaacatctcatcaaaaacacccctcgctctcacataattccccttcttacacaacccattaacaatagcattataagtataaaccccaggcttcaacccgaggccccacatcgagttcaacagctcaaaagcctctaccacattcccctgacgagaatgcgcgttgattaaagtgttataagttacaacatcagggaaaacacctttcccctccatttgggacaagaaaaccttaaccttgtcgaacctcgcctctttacacaaagcattgaccatgatgttgagagtgtagacatttaccgttgtgccacttgcgacaacatcctcgtacactgtccatgccaagtcgacccaccccactttgaccaacgcgccgagaagcgcgttggaggcgttgatggaaacggagaagcccttttgcctcaacaagcggaaggcttcggagccttctcgaagcttccgggactgaacgtaggttctgatgagcaaatcgagaacagtggcgttggtgggagtggaagtgggagtgggagaagaaggaaggagggaatcgatgagttgggcgcgcgaaacgccgcgttttcggatcattcggaggaggagggattgggcttctgggaggttccgggcacggacgaggtcgtggactgtgggacccgcgtgagtggagttgcggtgacattgatgaagaaggaaagatgaaggtctgagagtgtgtatgtgtaagcgtaggttatgagtcagtagtgtcttcgccattgatgccaagggaaagaccagacacggaaggaacaacactgggaatgaaccctcctactagcatgacatggaaacttttttgtttttctatgaaaaataaattatatgtttttttttttcttgggtctaagaaggtatggtgagaatttatatataatttaagtagcacaatcaaagttttttctattattctattatttgatttatgtataagattttattcaatccgtgcttggaaattagtgattgatttcatctataaaaaatttggatttttttaaaatattctttaattcattaagtcaaatactaatctatctgtgatttgtgattacaattagttaaaaaaaatcattatatctttaaaaaaattaaatttttaaacacaatttaataagtatttttttattgaaaaagataagttgttttcatgaattgaaaatttatgtcttatgattttttttaataattttttctcttttaattatttttatatttttttcttcattcaaacgatttttttatacatataaataaatcccaaatttattattttaaattattttcagcaacttaattataattatattgattataataattattattaaaataatttaactcctgtaattgtcctaagtacacctatcttgttaaacctaatcgagcaaaagtttatannnnnnnnnnnnnnnnnnnnnnnnnnnnnnnnnnnnnnnnnnnnnnnnnnnnnnnnnnnnnnnnnnnnnnnnnnnnnnnnnnnnnnnnnnnnnnnnnnnnnnnnnnnnnnnnnnnnnnnnnnnnnnnnnnnnnnnnnnnnnnnnnnnnnnnnnnnnnnnnnnnnnnnnnnnnnnnnnnnnnnnnnnnnnnnnnnnnnnnnnnnnnnnnnnnnnnnnnnnnnnnnnnnnnnnnnnnnnnnnnnnnnnnnnnnnnnnnnnnnnnnnnnnnnnnnnnnnnnnnnnnnnnnnnnnnnnnnnnnnnnnnnnnnnnnnnnnnnnnnnnnnnnnnnnnnnnnnnnnnnnnnnnnnnnnnnnnnnnnnnnnnnnnnnnnnnnnnnnnnnnnnnnnnnnnnnnnnnnnnnnnnnnnnnnnnnnnnnnnnnnnnnnnnnnnnnnnnnnnnnnnnnnnnnnnnnnnnnnnnnnnnnnnnnnnnnnnnnnnnnnnnnnnnnnnnnnnnnnnnnnnnnnnnnnnnnnnnngtcaagaagaaaaaaagaagaaaaatacttcatctcaaaaagtgtcctatttattctattacaattcatctcatattttagagcatgttaacaagatatgataaacaatggataagaaaattagagtatgatgaactaatttttcttaaaaatttaataacaataataataaatatctatatatttaaaataattaattaatacatatatatatatattatagatttattatattattattatgatactaagaaaacaagacaagatagtgaagatactaaaagtatatgttagtaaaataagataaactagtttatcatattctatctcaccatcaattgaattttaaataagataggtatatgaacatttgtacaatgatggcatttgaattattcgaaaaaaagtgattgcatttgaatttacttatttcactttttaactatagataataactttttttctttctattttttgttattttttataatttttttttctttcagactttcactttatcacaattaagacatgactaatggtgtatttgaattatcgttacgtagcttcaaaatgtctgtttgtaccttttgaaaccctaataaaagaagaaggaactatatattaatcagagataacttgagttatgttgaacataaccgttttccaaatacacactaacaagtataatttccattaatcattttcttttcatttttcttttcagtgtccactcataatatctctatatttaagtaaaaatctagacgtacgaggacgaaaataacattaagatcaagaataaaataacaatcatattactaccgtgattaagattaagattgttagttacaattttatttaattctacgattaaaataacatgttttatttaaaatgcattttactatatttagtggaggcaaatctgatttatttatcaattaattttttaggaatgcaaagattgattagaacgaaccagcaagcaaaatacggacataagacgaattgaatttgtttcttctccctttgtctttccaccttcaccagaagctcctttctctgttcctaagcggagttagagggtcaaattgaaaacgcattcaattgcatcaaacacgtttttgttaatgttgttgcattctcttttcatattgccgtaaacgggtcctgtcctcgcttttctcacaagccactgaatttttttgcacctttcaccccaaaactttaacagaggggcgttgttcacggcaattcctcaccccaatggaaggtattgtgttttcctcttcaactttggccttatcagagatttgggtctttgattttgtggttgatttttctcagattacttcaatttccatcctttgagattggttattggaacccataatatggattttttgtgttaggttgttgtaatggtgggtatggctccaaggtcttcaatttggggtatttggggtctgaaaaagtgagtcaaactgaagggtaccaatggggtttgattaatttttatcataattgaaacttagtttttgatgttttcgtgcatttttctcttccacgttttctttttctatggattggagaagtttttgtttgttctgtcaatgaccatttactgtgtctaggcttggatctactttccatgtggaatgtgtggaattaggattggttgtcattgttcctcgtcttcttgttctttcatacttggtggtgattggcacaaatcgtggttctctgcggaagactctatgaaattataaattctctcaaaattattctttgttcagttgagattagaaaactctaaagaaataaggaacatgtactgatcagtttcatgtaataagctggttgtatcaaacttgtatcatatgacaaatggtatgctagtggttgtgagtcgtggaaaaatcgtggtgggaagatgacacgagtgtatagaattagaatgtattgatatcttagataatgaacagatttttctccagcgactttctaaattttgatttatttggctgtccacttccctgattttttaactgcacaatactcactcttgggattgccgctcccttctgccttatgatggagattggattatgatctaaatatatattatttagtattttaattttgatttcatatttagggtaattagttagtttgtgttatcttttagatttaattataattatcttatgtttaggggtttatctttattttgatggtctatatatagaccctcatagtgtagaccttatgcatgtttttgctatttaataataacaatttctttttagagagtatctagtgttatcaattggatgtaagtagagcttgtattgttgcattgcatttacttagagctaagggacttagtaacttgggaccacaaaattcattagctatgtgttagtaactcttcagtgatcctatggaacaacctcctaacctttggacattgttagtgaaggatactctatagtatccaagcagctcccaagttatgcattctcctttaaatctctttgtttttttttcttttttttnnnnnnnnnnnnnnnnnnnnnnnnnnnnnnnnnnnnnnnnnnnnnnnnnnnnnnnnnnnnnnnnnnnnnnnnnnnnnnnnnnnnnnnnnnnnnnnnnnnnnnnnnnnnnnnnnnnnnnnnnnnnnnnnnnnnnnnnnnnnnnnnnnnnnnnnnnnnnnnnnnnnnnnnnnnnnnnnnnnnnnnnnnnnnnnnnnnnnnnnnnnnnnnnnnnnnnnnnnnnnnnnnnnnnnnnnnnnnnnnnnnnnnnnnnnnnnnnnnnnnnnnnnnnnnnnnnnnnnnnnntttttttataattgcaaaatcattttcttgtaaatatttgatctaaacaattcactttttaattcaaatttaaggaaagaaactttctggttcttataattatcaacatttcacatgagcaacttgacttcaattgcccaagcatgcatccttttccatattgtcataactgttcagcacctcagcatatagttgtatcttttgattcaataacatttgtggatcaatttgagaggttaatatgagataagatgttttttgattgttgtcttcttgcatatattactgtaattattttttccattccaacacaacacgtgtactaaacttcctgcatttctgttggtgtttagaatcaagtgaattgcaatcagaagaaaataaagtctccaatgagaaaaataagaaaagaaagttgaaaacaccggcccagcttaaggccttggagaatttttataatggtaagaatgctttttctaaatgggtgttaatgcattttccaaggtggtaatttttgagcaatttcctttttttttttttacctttgtttccagagcacaaataccccacagaggaaatgaaattaatacttgctgaggagttaggattgacagaaaagcaaatatctggatggttttgccacagaaggttaaaagataaaagattgatgaaagatgaagctgttgcaaatgggcgacaagatcgttcaagtggtgtcatccaagatcatggcagtggacttgggcaagattcatgcggaagcagtaagcatgctgatcacaggtatctggatcttaaggaggttgagagccatggcctctacaatcacgaattgtcagttgcagatatgagtcatggatgtaggaaccgttatcctgaaaatgttagcggggtgggtgacacatcatctgagagcagctcatttttgcaagaaaggttgttttctcaaggtcaggatccatatgatatggagccttctagacatcttacacctaatggagctcttccacccctaaatcccaaaggtgcagttaacatgggacacaaaccatcaggatatttgaaagtgaagggcgatatagaacatgctgctataactgctgttaagaagcagttaggaaggcattatctggaagatggtccacaacttggtatagaattcgatccgcttcctccaggggcatttgaatgccaaactgcagatccagctaatggtaggttgcaccatattctattttccaactttttaaatgtctcattcagtttgttttttaatactgaaatgttgttaagtgttgaaattgaaacaatgccatattgggttaaaggaatgtgttgttacacatcaaattgtgaaaaaaaaaaagagtatgaagcattattcttttttttttgtcattggcagtgaatgcttaaagatagaactgggtgtgataggggatgaattgtttatggaacagtaaataagtgttcccaataccaaataacctgcatcatgtttatatgcgattcattgggatgatttagatgcttttacggaatttaagctgatgccttcttagtattgatactaatagggtcaatgacaatcttataagattattttatggtctatattattaagagcacttgtcaaaagagtgtcacttctcataagctagtgttttaaggatctaaggctttggatatgtgtttttagcattagaaccaagaacttaacaaaactacaaggttttgttcctttgtgtagatcattttacttcttttcttttgctgatgtcttgcatttttatttgcttgttttttaaatgcccaacgcacatacattgaagaagttgcggttttgttatccttaaatttggaaagcttattcctaaagactgatgctgccttttatggttcataatgtgtgcagaatgtgctattttacttgtttagttcaagatagttgatttttgctctttgggtgccttactggaaatatttcatcttagctaagttgtgagggttctgtttcgtttcattaactctagaccatttttctaactgcattgagtcattttaagagtagattgagaattgggattcttacctttataatctaatggatgctatggcagaaccatactctgttacaaatcctctgcttccgaattctccagaaatctctgctgcaaaaagacaacccagtcttagctctgtaagtgacctttctaattcatatttcatgagtttagcactgaaatactgtctgtttaaattatatgacgcatgcttcaaagattggacagtgacctaattatttatgttacaagcttatgatgagaattattatttatgttacaaacttaaaactagccctgaagatgtatcagaagattcagaacaaaacccaactttgacttgttgactcccgaattaatttttttttttttgaaaggaaaatagataattttgttaccaagaccaatatcaagcacaagttgcgcccgaattggatgaaccattacaagaaattatccacagtaatgtgctgcttctgtaatgcaattacaaacagaggaaaaaacatatgataaagttgatttatatctgttgtttcccacgttcaccaaataccaccaaatccattccttcaatattttctgtcacactccacaaagccaaaactgcagttacacaaatgactgagatgagtatgataatcaactttatgattccaaaccgagctgaaatttatttccatgttgttcgcttcttttgacatcagtcttgcaactctcaaaatttatatgacattcttttataccattccctacctttaactgacctttgatagcactacaattacctcttgttaccaaaccaaagatcctgtcacccaccccttaccagaattttctttttaatctctctcatttttaagttttggatttcttcaaagtggtaggaaaaggggatgctatcatcttgccatttatattggcttcagaatattatgtagtatagttcaaatatggtacagtgttatggtttaggaatcagtggtaatgagaaagaaatggattggagtggttattcccattacaagtcaccagacagagttggtgtttgttgtagtaggattagaccaaaatggaatgaatggaatagcttattgacaaaaataatcttggatttaaaaaagcaaataataaattttacttttaattttttaacaatataatattatgcaacatgagttgaatgcacacacaatttgtggacagtttttcattttgtttaaatagtttaagataaactttgtcaagactcgacaaaatagcaaaagattcctttcttagtgggaatgagcttattcttggaatgagatttctatcctaaaacaaagaatggtgattccccaagaatgataagtaaaatgtggctaaaatggaatgtttatttttattgagctaaatgtgacccttttacttcttacagatgcttaagaggaaagaaaaaattaagtgctaggggcaacctttccattgttccaagttattctgactgcaagttaaatttttaaatggactagaagctgtgctttgctttataagtattaacagtaattttatacttgtgcttgctcaatcctcatgtaaaatctttgtattgctgttgagcagttttaaacttatcctgtttataaacataacaacattgattatgtgatacaaatttccctgctttctcactctcttttacttgtgtatttgcagagatatgattcatattatactaaatttagttcccaagatctgcatatggaaggagcagactttggttcctcgcatgaaactgattttcaggataaacaagataagaaagcgcaccagaatataaaacgaaggcaacctttatatggttataccggtcattttcctggaaggaactctttcccagatttgtatgaagactctactggagaagcatctgcttataatagcaccaagagtcatagaatgagcactaaacatggtgttgaggggatgcgatctgattctgcttctaaccatagtgatcactatgaagagaagcttgcagttaagcagaaaggcttgatgctgcatgtttatgataatatcaatccaaagaatatacaaaggagtgaacatgtaaaatctaaaccttctagttcaatccgtaattcccgtgttcctatggatactgaagaacgggggttatctgctaggatggcaaaggttcattaatatatttacaccctctgtgtgttatatttgtaatggtcaatttgtcttgcttacagatggtttaaaatgcttaaattttgtgtcaaatgtgcaggaagagatgtttaagggggacaggaaagcaaaaaatacataccgcaatgtagatggagcagggatgctttcaaatgaaatcatggttagttttagatatctaaattttccttttggaatatgattatttgatttccttttgagctcattcccctccttccaagcatgtatatgatgttttgctttactatatgcataggttgcaaaacgagctaaagttgacatgcttcaacaatacaatgtgaaaaaatcacctgttgctgagatggaacaaaggaaaactcagaggtgggtatatatgcatgttttatttttgtctctcatgaccgatcactcaggtcctcaatagaaaaatagatttataaatttatagattgtgtgcatgtttatttaggtagcgtttgacttaacttttttttttttaggttctcttttctttaaaaagagaagttaggccaaacatttttttttttttaaaaagcttttaaatatatgactagtttttttaatgatcctaaacccaaaagacaaagtttatatagaataagctaattagtagagcttttacttttaagaagaaaagaaacctaaaaaagctggggccaaatacaaccttagtagtatttatttttgtgtttagattttttgttttcggatcaatgttgcttgcctcatgaaaatgggataagggttcttctattgcacatatgctaacagtaataattgtgaaggcagtagacagtaatgattgttggaaattaattataattttttgttagcagtaaagatcaaacattcaaacatgtagagttatcaacagtcgtcatgtgtgtttagtttaaaaaagattataatcaaaacactagtaagattttggctaaaaagctttctttgagtaaaagaggatttctaaacaccaggtgtggccgagtgagtaaattgagttccatgtgggtggactttagtatttaaattccccactagaaccaccttttggtcaatgtaaaagcctatagccttgcatggattagtcccacacatcatggtcttacccaatttacaattttctattctatttttccttagaaagttttcaatcaagttgttttgggatatgtatagaggcctcttttctaatggcattttatatgatcatgcagatctgctgcagacttgccttctagctttagcgaggatgaaactgctgacaccagttcctcactggattattaagtgctgttgataaatgctaacaagtgtgtgggatttctctaagccattgtgtatgtacagcctaaaaagacatacattttctctgtaacgtgggaaccattgtttctggcagcaatggcagtgactcgctccatttgctgttttttgttctcacctatttgcctttgtaaaaaaaaaaaaaaaaaaagtacacccggttattttttggatgtaaaatctcatttcctgaagctgttcgtggtaggtttaatgcacagcttatatacttgtcatttgtcttttattggtttaatatggtagtgtgtatggcatcctaatttgctccaatttgatctctttctttggagagatggctacttctactttatgatttaacaattcgtttcatgagttttgtattgtttacccaacactcatatcgatctagtgaggataatattgataagtagttgagattttaacttattagtctcatggcgcatattccccatactaagtgtatttgaattgacggtgataaaattgattttgaataaaattgattccttacttgtgcatatgaaaaaatatctaatggagaggtcaatcccttaaatggatttcagtatctcgaaagattagtctttatctttcggctggggaatactttggttgtaatttttttttatagaattgattattgtagaattgattttggtagaagttatttttatgtgcttttaactttatcatatttttttaatcataattgattttattaggattttgaaaataatccaaacatccaaaaatttggtcaaaataaaggttgaaccacctcaccataatctaccatgattttagaggctatttaaacacactaaattatcattctcgcttaacaataatagaattatttgtaatggaaaaactgatttcttgttactgaacctaaagtaagcaagcctttcttgggagagcttagtccattttattgcgaaggaaaaagacacctaacatatcagggttaggaatcttaatggagaaacttcaggattacatgtgttaccatgttagaggtcccaacaaagtatagagtataaatataggaacttaggaagagctttattttagggcaagatttgcttatggnnnnnnnnnnnnnnnnnnnnnnnnnnnnnnnnnnnnnnnnnnnnnnnnnnnnnnnnnnnnnnnnnnnnnnnnnnnnnnnnnnnnnnnnnnnnnnnnnnnnnnnnnnnnnnnnnnnnnnnnnnnnnnnnnnnnnnnnnnnnnnnnnnnnnnnnnnnnnnnnnnnnnnnnnnnnnnnnnnnnnnnnnnnnnnnnnnnnnnnnnnnnnnnnnnnnnnnnnnnnnnnnnnnnnnnnnnnnnnnnnnnnnnnnnnnnnnnnnnnnnnnnnnnnnnnnnnnnnnnnnnnnnnnnnnnnnnnnnnnnnnnnnnnnnnnnnnnnnnnnnnnnnnnnnnnnnnnnnnnnnnnnnnnnnnnnnnnnnnnnnnnnnnnnnnnnnnnnnnnnnnnnnnnnnnnnnnnnnnnnnnnnnnnnnnnnnnnnnnnnnnnnnnnnnnnnnnnnnnnnnnnnnnnnnnnnnnnnnnnnnnnnnnnnnnnnnnnnnnnnnnnnnnnnnnnnnnnnnnnnnnnnnnnnnnnnnnnnnnnnnnnnnnnnnnnnnnnnnnnnnnnnnnnnnnnnnnnnnnnnnnnnnnnnnnnnnnnnnnnnnnnnnnnnnnnnnnnnnnnnnnnnnnnnnnnnnnnnnnnnnnnnnnnnnnnnnnnnnnnnnnnnnnnnnnnnnnnnnnnnnnnnnnnnnnnnnnnnnnnnnnnnnnnnnnnnnnnnnnnnnnnnnnnnnnnnnnnnnnnnnnnnnnnnnnnnnnnnnnnnnnnnnnnnnnnnnnnnnnnnnnnnnnnnnnnnnnnnnnnnnnnnnnnnnnnnnnnnnnnnnnnnnnnnnnnnnnnnnnnnnnnnnnnnnnnnnnnnnnnnnnnnnnnnnnnnnnnnnntacatttgaatttattattattattatttaaatatttattatattattttatcttgtaggacgtgtaatagaatttttcatgttaatttaatttttttaataatcttgtattattttattattcaatatattataaagtatttatttaactaatactttagctggtgcatttcacggtataaatatttattcgatataactaaaatttataataaatacatatttgtaaatatataaattatattataattaaaattggtaattaataaatattttagaatatataattatattttagatttatgataaataatttatattattatataatgttagttttaattattgatactttcttttaaaaaatattgaaatccaagttagaactaaaaatattgaaaatgatagattgaaatagattataggttaaaaatattttctagagacgcttttgttaaagaaaaaatctaaaatattttcgttaaataataaccaaaaacactctctttggaaatagctatttctaatttatatatggaaggattagaaacatgtttatatctcatctctatccttgtgtctccaattttttttatttttttttatgatttcttccttccttcctcattctcctatgattaaaaaaaaagtctcacatgtttcgaaaataatgaatacaaacaaaggaaactgttcctggctaatatacagagaaatctaaccattcaatctcaagttgggacatccttctgccattgattttgaatttggacccttcattttttaatttggttgtgtttttggtctatcataaaaaatataaaaaatcacaattcggaaagacctaccaaccttttgttagggtagtggcccaaggcaacaagactggttgtggttatgcgggtgtgggactgtggatggtgtggtgcatctagaaatctctcctcaatttgcatcttaaattagcacaatccagaggccaattggatgcctaatgctattttattatgtaaaatgtacaaatgtgtatgttgttttgtgtgaattggttcttaccttttggattttttttccatcaatcaccaaatcctagtacaatggatacctgactacgaaactgttaattaaatgatgtatgtagtagttcgtacttcgtaccctgttctttattttagtcataaaaataaaataaggatgaactaaattaatcaatcggcgcagaattggatacctaagaaagcatgtgccgaggagggctttcatcaatcttaacaaataaacatgtgttttctacggttttcgctcattaaaagtttaattagtgtagggtattaaactttctaaacctaacttgtgatgctcttaaattcagttgataaattttatgcccaacccttcttgcatagttgcatattagatgtttagatgttttttaatgcatccaaaaacaggattgttttgaaaatcaaagaagggtacctaaggctaaaatcttgtgtcggattctttttatagggtagcgttttggtaaaactttataatttatcgtgcgtgtacgtgtgaatgcaaatggctaaatcatatcatccattattttttatgaaaaggtatttcatactctttctattgtgtgttactatctaattagttaaggactctacaatttgtacatttatataatttcttacaatcatcaaactaattaaatttgcaaacaaatattaacttctcgtaaaattaatatccaacatcacagtttcaaaaactgaaatgtatcatggatatgccctagagtagattcaagtcaacttcccatactcacagctaagaaaatctaacttgaatatgaattttaacatcatatggcgcagatcctccatagggaattggggattaattatgtatataacaccatactatgaatctgagccgagaacatgaaattacgccaaaagatagtttctcattaataattgtagggcaaggaccacagtgagccacgtagaatggattgaaagagtaacctctcacaatagtcatgcttaaaagaagagcactaatgcaaacattgggtgaatgataggttctctctcccatataggtcaatttgacaaataagcttttaaaaggtttggtcgacttcacaaaataattgcgaactgaaacgttacttcaatttgaagaacatctaactctacattaccccatatttcaaataattagatattaatgtccttccttggttaatagcaccatgtcatgaaaatatagcttaacttatataattatatgctaataaattttattatagtttaaatatcttcagcttttgcttttatctgaacttaatttaattaacttcattttacaaaaatattgagtattgagttttattattgcaaatctcaagagtgttgctttatctttatttttcctttcctggttaagcattcagaatattcttcatgagcaaatgtattatgtataaggatataagtagtgagcagcgttaacaaaatcaagtcgtactatttgattcaacaactaaattggtaaattagttaggtaatagaattattagattaattatacaattgaatcaatgcaaaccgatctgaatcaaatctaaactaggtttaattagtattaggttaaaatgacacgtaccggttttgcaaaatatgtactgcaaatttctataatttataattaagatttaaattaactaataacatgataattagcttatgttacattaaccattacattcataacaattatatgttaataaattcaaaccccttcaacaagtcatatatattcctctacaaacgatagtattactcttcttttggcaaattcaagtgacaaagtgtgtggggtgagtccttacaataaacacgtactctcactttcaaatctctattattatttttggcaaataaaagactcgtttaaaacgcagaagaattttagtgtcactgatatgctagaatatgctagataaattttatttttgattcgcaagtttcaactcatcatcaatttctcataaccgatccttaaaataaatatgttggatcaatccagagctattattatgtttaacatactactgtttgtgacctaacgtgtgaatattcgaaccaaaatcaataaagatgcatatcaaatttagcataggtagtgattcatggatatataaattttacagaggacataaatttgaaaaggaactcttggaagtacaatcttttttgtgcgtgaacttacatgctcatgtaatttgtgtcaatttaatttatctccagccaatgcaacacagcaggagaaacaaagataaatttgtaaactatatattgaattttatcttcatgcgtactttttaaaaacattccaaattctatacatgatttccttttcccacatgatatgaaagtaacgtaactattatgaattccaaggggggattcgatcgagaggaaattaaaggcttttgatatcatgtggtaaagggtgcatctgttccatcaccctacagtgtaaattctgtgaatgtgggactaagagaagttagaaagtgtagggcaattaggaccacttgaggaaaagaataggggaccatgaatttctatgacttgtggctaagggccaacttttccaaaaagtgtaccacactggacagtggtgttggtctcaatcactaacaagggttggaaagacaagtgccattgtcaaagggtatcatgggtgtttgtgaactccagccatggtgcacatgcatggattgattaatttgaagttagttttttacacacactcacccaatggaattgatgggtttttgcatgtccccatttgctagatcttttttattttgttacatcactttacttgattgtgtgtggagtttaataacttcacacacatcaacctcatgaaacaagctagggtgaaagcaacccacaaagttaattaattttaaaaaataatacaaacaaggtgagtgaggcttatgataagaacccgctcacgtactgcgctttcagtgcctaattattgccatagctgcagcctgcagtgtgctggatacagcttaatagatggttcggttaaatcttatgtattaacatattaacgttaatgtcgtctctaaataaacctaaagctaattttaagatggattttaaaaaaattaaaaaaattagaattttatccaaaatttaaactattttggtaaacatgggatatctagtcataatgagagaattctcttaaaggagccaatctctcttgagagatatttttttatatacacaaacttagaaattatacttttaatcacatgcttaagggtcactaattatttcaaagacaaatgaaatatttgaaaggtttgttgaatttcttataagattcatacaattagaatgagagtgtctaaactatgaaatattattgtattgacataattttgcttgattgaagtaacaatttgttgtaataaaataaatagaacaagaacaaattctccatagatgaatccattttatgaggaatgacaaaagtttgttttccctattagaccaaactttccttttgaaaacaatgttttctctattgcaatagtcaacctagaaagattaaaatagcttttgctcatgttattttaacaatatttatagtgatttgtgttttttttattttcaacaaaaaataagaattgctcaagaggttgattattttcattttcatcgaccacgacttgcatggcttttattcctaaattcataaatggttaatgagggttattaagtagggacaaaggtttgagtcaggagggtgatttgcgtggtatgcatatgtagcgtcaatcatatatcgatgaaaatagtattaactaccaattgtcgacacaactaatgacaaactgaatgcatattttaatagtgttactttagagtttgccatgtggtcactacacataatgttgaccacttttgaaggaagttttaaaggtagctttgatttttttttttttttttggaaaatatgtaaattttatatattaaccaaaaatgatttacaagtactcagggcatcccctggcgaaacacaaaaagaggctaccaaaagccacaatccaccaaaaagtgaaatacaagtactcaggacattccctggctagtcaaagaaaaaaaggttacctaaatacatcagaaaaccacattaaggatttacaagtactcagggcatcccctggccaaacaaaataaaaagatgcagtctatagacatcacttgtcaaaagaagcaaatgtacaacccatcaaaagctgaaatacaaaaagcaaaaacatttgttaatacaagtgagtcagatgagcatgaatcctaaatttaattctatctaccagatctgtcatattaaaaacatgttggtcaaagagaaatggtgttcctgcagctccaaatttttaaaccaatgtcatgttgcgtcaacaatgatgcaaacccaactattttgcgttgagctttgtaacgtttgatttgttgaagaatcgatgcaaaatttgacgctcagtgtgatttttcgttttgcgtcgacttttgcaatttagagttacatttgactaatgttaaatcataaatttcttgtaatgttagatgaagagtaatgttgatatttataagtataagatgggggtactaagtttaagattatgatacctagctatgccaagcaatattttaagtgtagtttaggttctgactagctagaaaaccaaggaaccaattaatgactatgatctctaaaacaacgatggttagagagtattttacagatctttctctaaaattgtgacgatatttttttaaaatattttatgtgttttattaacttcacttatttcatctatacgtttttaaactttcatatttttaccatcgatcttaatctttttattttttaacaaattcaaaatacaatatataaaatgtaataaagtaaaaagaaataaacatattttatcatacacaatttatttattttattaaagcggtaatatttttggagggagttaaaaatataagtttagaaattctttgtataggtcaaccttaggaattgtttctcaaccacataaacaaaaacaataacatattgaaacatctcaatgcgttgacaaaaagaaatcaaaagtgattctcaaatagttacgacaaacaacatggaagcataataaaattttgaaatgggattgtggaaaagctatacaagcattgtattgctaatgacaattaaatggagagagtccagtaaccaagagttgatatgtgatgaatggtgcaatggtggaatagttacaagaggaaaacatgaagaagaagaactactaacacatgtgtacacccaagtctaggtaatttaagtaatggcagaagtccaaaataagactgtaacattaataatgggttgattaaggaagctactaacgtcctaacaaactgaagtcttcatatgataattgtcactaatatagacccaagtctaggtaaattattcatgataaattaggatgaagtttgagcgaaattaagtgattataaaaaattaacaaatgagtttgtagagcccaaacataattagtgagacaatgagagattaaaaagaaaagggactcaagcgaactatagatgcacttgaagcaagacattttattgctctgatctatttattgtttgtcatgtcagcaatctacttagaaaaattaaaaattattattaatttaagaaacaacaatgatccacaatgctgacatggcaaacaatgaatggatcagagcaacaaaaatgtcttattccaaatacatctaagaatttctcgtcattatatattacttcaaccgtggataaataactgtaataaaatgctacatttttttatagtggtcactgttctgtacgttgagaagggaataaaataattcgaataactgattaagggtcttatatgcctgctattatgatgaagaaagtaggaatgtaaagacaggtaagaattttaactagaaataactacatttaagagagtacatatttaaactttttttaattttataataataagaatatagtaaaaaatgatggtcatttatttttaatctatggagggggacctttttatccaaatcaagaagtaaattagtcaattaccaaaaaaaaaaaggaattgaattagtcaaggtgcggacaaattgattggttctatagaatttttaaagcaccatcacgataaggatgaaaagtattaaaaaatataacatctttacatttttcttcattaatttaagtaattttcatctgtcacaccaaaagtgagacttgggttttcgaattgatagttgcatctcagtatctcagatagatgatgatgtattaagtgtttcagtcttcagaggatttcatagtaaaaactaaaaatgttattcagatgatggataaagggcggatgaacaccggtgaattgaatagtaataataatttagttataataataatttctcttattttagtcagaagtatttaattaaccaacacgattatttttaaattttctttttaataaataactatatcaacttttctcgaaactagcaatttttatacatttctcgaaactagcattagttacacttattaacgtatatctattttacaannnnnnnnnnnnnnnnnnnnnnnnnnnnnnnnnnnnnnnnnnnnnnnnnnnnnnnnnnnnnnnnnnnnnnnnnnnnnnnnnnnnnnnnnnnnnnnnnnnnnnnnnnnnnnnnnnnnnnnnnnnnnnnnnnnnnnnnnnnnnnnnnnnnnnnnnnnnnnnnnnnnnnnnnnnnnnnnnnnnnnnnnnnnnnnnnnnnnnnnnnnnnnnnnnnnnnnnnnnnnnnnnnnnnnnnnnnnnnnnnnnnnnnnnnnnnnnnnnnnnnnnnnnnnnnnnnnnnnnnnnnnnnnnnnnnnnnnnnnnnnnnnnnnnnnnnnnnnnnnnnnnnnnnnnnnnnnnnnnnnnnnnnnnnnnnnnnnnnnnnnnnnnnnnnnnnnnnnnnnnnnnnnnnnnnnnnnnnnnnnnnnnnnnnnnnnnnnnnnnnnnnnnnnnnnnnnnnnnnnnnnnnnnnnnnnnnnnnnnnnnnnnnnnnnnnnnnnnnnnnnnnnnnnnnnnnnnnnnnnnnnnnnnnnnnnnnnnnnnnnnnnnnnnnnnnnnnnnnnnnnnnnnnnnnnnnnnnnnnnnnnnnnnnnnnnnnnnnnnnnnnnnnnnnnnnnnnnnnnnnnnnnnnnnnnnnnnnnnnnnnnnnnnnnnnnnnnnnnnnnnnnnnnnnnnnnnnnnnnnnnnnnnnnnnnnnnnnnnnnnnnnnnnnnnnnnnnnnnnnnnnnnnnnnnnnnnnnnnnnnnnnnnnnnnnnnnnnnnnnnnnnnnnnnnnnnnnnnnnnnnnnnnnnnnnnnnnnnnnnnnnnnnnnnnnnnnnnnnnnnnnnnnnnnnnnnnnnnnnnnnnnnnnnnnnnnnnnnnnnnnnnnnnnnnnnnnnnnnnnnnnnnnnnnnnnnnnnnnnnnnnnnnnnnnnnnnnnnnnnnnnnnnnnnnnnnnnnnnnnnnnnnnnnnnnnnnnnnnnnnnnnnnnnnnnnnnnnnnnnnnnnnnnnnnnnnnnnnnnnnnnnnnnnnnnnnnnnnnnnnnnnnnnnnnnnnnnnnnnnnnnnnnnnnnnnnnnnnnnnnnnnnnnnnnnnnnnnnnnnnnnnnnnnnnnnnnnnnnnnnnnnnnnnnnnnnnnnnnnnnnnnnnnnnnnnnnnnnnnnnnnnnnnnnnnnnnnnnnnnnnnnnnnnnnnnnnnnnnnnnnnnnnnnnnnnnnnnnnnnnnnnnnnnnnnnnnnnnnnnnnnnnnnnnnnnnnnnnnnnnnnnnnnnnnnnnnnnnnnnnnnnnnnnnnnnnnnnnnnnnnnnnnnnnnnnnnnnnnnnnnnnnnnnnnnnnnnnnnnnnnnnnnnnnnnnnnnnnnnnnnnnnnnnnnnnnntatatatatatcatagaatgaataataaaatagaatctatttaagtagagtaatactgtggattttgaattaaataatattatttaatatttaaaaaaatatatgagattatcatgtcacattatttcttagaattcaaccttttttttatacataatatatattagatttttttcttcttatagcaattataattgggacagatgaataataaatttaggagaatgcaagagaggtaagtataatttttttaaatgaagaggtgcaaaggtaattgattctaacttaaaggaaaacaaacgtaaatatttatattttaaggtaatttttttaatccaatttcaataatttatattctaaaaatcattttctttaattttttagttcttattttcttcttaaattatacaccttttataatttaaatatttttaactttaaaaatattattggcatctcttacaaaatataaaaaataaaatcattttaatattacagtctgctccatatatagaaaaaggaataatcctgaaataatctcatctttagtcaccgccacccaaccaggacaaagcgattccggcattttcggcactgcaattatatacacatgtataattctaaagctacctttttttattcttcattttttaaattctctttttaaataattgtgctttgtttttatcagtaataaataataatactcatagtattgactcaagtcaaccatgaccagtttatccttttttttaaaatatttatttattactcaaatctgtccgtttctttttaaacgtttttcctgatgcctgtaatcaaccaaaagaatttagtttaatcagaacacataacgtaaaaaccaataataaataaataaaagcgtagcgtaggggcaaaatcgtaaattttgacgacaattagggcgattcctgtgtccgtttcacttttcttaattaaaaaaaaaaaagaatttagcttgcttctgttttgagctctctctcacactcactcactcctcagccatagagacgacactgtgtttcttttttatgctttttttgtaattccattccgctttctctctctaaaacctcactttctcgctctctctctctctcccctctgcaactgattttccagatcatacttcctagattctcccattccgtttttccggcacttcctcgccgcgccgccgcgagctcgccgacccctccaccaccggaatccgcggagcatcgccaccgcaacctcgatcgcttccttcttccgcaacctagcacctcgtgccggtgccaatcgctgcttcggagcacgctggagcagttcccgcgccgcatgaagcagtggagcagcgctctagttcggtgagtgcccgacggaggcgtaattatggtggattcgcgcgccggaaaaggctcggagctgttggagcgagggtttgagtgtgcgaattgatgaatggaagggttcgggtatgagaacgggtgaatgtgaaagattagtgtttagatttgaggagagagtgaaagtttctaattagtgctattcgtgttttttttttttttttgcgtgatgtcgctgactagtagaatggcttcggatcttagcagaaccggtcctgtggaaagagacattgagcaggtgtatatctatctatctatcttttttttgtccatttctttggtagctttttctctgtagcgtcgtgcttcgaatttcatgctggagtactgtttgtttttagattttgtgtatctgattggtgtgcgtgcgctgtacagtggtggtaatgttcttatttgttgttgttgggggcattgggaataggtaattggcttaatttagctaggagcttaaaattttggatggaagtctagttgcaatgttttggttcgttagtttgactgccagctaggattgtattatcatcaggtcaagctagtttatgattggcagtgaaaaatcttggtgattttgagctgttgcttaggaaattttcttataattaaaatttacttaatgagtttgtttatacgtagttaagtatgtgttgtgacttctgaatgttgttcgaagatttggatgcttttttagtggactaaacattttaggtatttgactatgtgaatattagattatttttttcttgaatttatgtttcactaatttgaccatttggagatctttctatttaattatcgttctcttttatggattgtttgggtgttagataccatgttttgccacaggaatacaaggcaaatgcattatgctgttactattatattgactaatagacagtatgttgaatttttggactttagtagctgttcttggtgcttgtcagttgaatgttatccatgaactgtgcttattcattgattcctataatatgttataagttttctttatcttcagatgtgttatatatgctggctgaagtcttttattgatcttatcgacaggccattactgctttaaagaaaggggcctgcttgctcaagtatggaagaaggggaacgcccaagttttgccccttccgtctttccaatgtgagttttgtactctttatctgtagattcaaattaatccttgttaaagtgtgtgtgtgtgtttgtgtgagttttaaatacttatatttggcattaataactttgtccccgtatagtttcaaaacgaagctcaaacccttgatttttctacattttattttgtatttatttattcttaaatagtggtgaaaatatttcttttaatggatggtagggtaggggaccttgaagttgaatgacatagtgaggaagaggagagcgaaaatgtgaagtacttgttaaacaaattaaactgtgaaaattaagagatctaaaatcttcatggtctactagaaaaattacaaatattacggaaagattaatcaattgcttaacatcaattaggattgccttaagattaggttttcaaaggtgtttgcactaacaacatattgaaaatttgataaagtcacgataattatggcattgagcttagcatgaattttcagcaacaaattgaaaatgtgaaaacttgattttgcttttagtaaaccattgtaagtgggcagccctgactagtttacagggaaaatttactagtgtatggttggatacaaccctcccgcatgagaatgatttgatctgcttaagacacccattgtgccaatattaaaaaatgggaaacttgcctttgaaaaacttaccaaatcttgttaaagcaagcattctaatccacatatctagaaggtatatttgaaggtaagcatgcatgttaccttattattgaccaccacaccatatcaaacacttttgtatttggttatgattatgcatgccatttatggaatcactttcatgtcatttcatggtttgaaagccatttgattatcttattattcccctaatcttgcttctggtttatttatattattttcataatttgaagtttgtttttagatgttttccagttgccaaaaaaataagatttggcttctctactttttcaggatgaatctgttttgatatggttctcagggaaagaagagaagcaccttaaactgagtcatgtctctagaattatatctgggcaacgcacagtaagttttagactgacagtgcaaagtcacgatactgttttgcttcttcagatttagccaacagtgccttatcatgttgagataactagttatgacagttctgttaaatttgatgtttgtatgaataatacagttcgtgtcacctttctctatatgcacttgtgatgtgagtgtgaccaccatgtgctggaagtcaagatatgtaaatatcatttatttcattatccatctacagtaaaaggatttgtttctttagtattatgaatagtttacaatatgcttgtttgtggtaactattagattatgttttgctttgagaaacatgatgttgtgtgctgtttcagtgtcctagtctaataagttgacatttatctaaaaaaccattactcatgctttcttgactttcagcatctacagtgaattcatttcaagtgattaggttctctgttatgattgataaaacatggctcctacttttttcagcctatctttcaaagatatccacgacctgagaaagaataccagtcattttctcttatctacaatgataggtcactggacttggtatgaattttcttcattcctctcctcttggattttttagctgcagttggcccgttgctttgcttgtacagatgttattgatattgtgaacagtatcaatgtatttgtatgcagaagtttaacacaatctggtggtctgattctttttctactagatatgcaaggataaagatgaagctgaagtttggttcagtggtttgaaagcattaatttctcgtagccatcaccggaagtggagaacagagtcaagaagtgatggtattccatctgaggctaatagtcctcggacatacaccagaagaagttctcccttgaattctccctttggcagtaatgaaagcctgcaaaaggtataaacttattctttatgtcccttctattttctccatttttctctacattgcagttgaatatgtttattaagataatatttatttgtcctattcaggacagtggggatcacctttgccttcatagtccatacgagagcccccctaagaatggtttggataaagcattagatgtggttttgtatgctgtccctcagaagggtttcttccctccagattctgccagtgcttcagtacattctgtgtcatctggaggatcagacagtatgcatggtcacatgaagacaatgggtatggatgcttttagagttagtctatcaagtgctgttagcacatctagccaaggctctggtcatgatgatggtgatgctctaggggatgttttcatttggggggaaggcacaggtgatggtgttttgggtggtgggaatcaccgagttgggagttgtttgggtgtaaaaatggatgctctatttcccaaagctttggaatctgcagtagttcttgatgtacagaatatagcttgtggtggacgacatgcggccctagtgaccaaacaaggtgaaattttctcctggggggaagaatcaggcggcagacttgggcatggtgttgactctgatgttctccatccaaagcttatagaagctctaagtaatacaaatattgaacttgtagcttgtggggaatatcatacgtgtgctgttacactttctggtgatctttatacatggggtaatggcacatacaattatggccttctaggacatggaaatcaagtgagccactgggtaccaaaaagagtaaacggccccttggaaggcatacacgtgtcatatatttcttgtggaccatggcacactgctgttgtaacatctgctggtcaattatttacttttggtgatggtacatttggtgctttgggtcatggggaccgaaaaagtgtttcattaccaagggaagtagagtctctcaagggtcttcgtactgtgcgggctgcatgtggtgtttggcatactgctgcagtcgtggaagtcatggttggaaattcaagttccagcaactgctcttcggggaagctgtttacttggggtgatggagacaaaggtcgacttgggcatggtgataaggaagcaaaacttgttccaacctgtgttgcccttgttgaacccaatttttgtcaagttgcttgtggacatagtctcactgttgcacttactacctctggccatgtctatacaatgggtagtcctgtctatggccagttaggaaatcctcaagctgatgggaagctaccaatccgtgttgaagggaaattatcaaagagttttgtggaggagatagcttgtggtgcatatcatgttgctgttttaacttcaaggactgaagtttacacttggggcaagggtgcaaatggccgtttaggtcatggcgatgcagacgatagaaataccccaacattagtagaagctctgaaagacaaagatgtcaaaagtattgcttgtggaactactttcactgcagctatttgtttgcataagtgggtatctggtgttgaccagtctatgtgttcaggctgtcgtatgccatttaatttcaaaagaaaacgccacaattgttataattgtggacttgttttttgtcattcatgtagcagtaaaaagtctctcaaggcttcaatggcaccaaaccccaacaaaccttatcgtgtctgtgataattgtcttaataaacttaggaaaaccgtagaaattgatgcttcatctcattcttctgtgagcagaagaggaagtgtcaatcaggggcctctggagttaattgataaggatgataaattggatttcagatctcgtaatcaacttgccaggttttcttcaatggaatccttcaaacaagtggaaagcagatcttcgaagaaaaacaagaaattggaattcaacagcagccgtgtctcgcccgttccaaatgggggttcacaatggggagcattgaatatttctaaatcttttaatcctgtttttggatcatcgaagaaatttttctctgcttctgttcctggatctagaattgtttcccgagcaacatccccaatatctagacggcctagtccacctcgttcaactacaccaaccccaacacttggaggtcttgcatcccccaagatagttgtggatgatgctaagaggactaacgatagcctcagtcaggaggttattaaattaagatcacaggtatcttactttatgcattcgtcaacagtattcactttcttgctgtaaatggtttgaatagaaatttaacaaaatggccttgtatggtaccatatttttttattacaactggtcattttttatgatgttaatttatgtgaattatgtctgatgaaatgagctatagacactgtggaaatgaaggcaagaagggagtcatatgcttattatgatagtttatactctatactattatgcttggatgtagatagcaagatgcatattcattgcaagtcagtgagttgctcaattatttgctgtattgtatgataataatatagagatgaattgcaatttaaaatccaggtcatcataaagttaccatatgtgtgctagagatgaggtatttccatgtaaatttaaatatattattgcaatgcagaacatgtggcaagtcactgttgaaggtagtcagggtttgtgatttatacttctatctcataataaaatattaacaataacagtgagtagatttttattttgacactgcacttttttctttaccattgtgttttggagggttcaatgaatcaattttaaagaggttatactgttaacaattcatttttttcctaagtagtttttttcccttgtaggtggaaaacctgactcggaaggcccaacttcaagaagttgagttggaaagaacagctaaacagctaaaagatgcaatagcaattgccggggaagaaactgccaaatgtaaagcagcaaaggaagtaataaagtcacttactgcccaggtagaaactttaatcccttaaactactttaacaaattagactattatagccaaaactcttaatcatgaagaaagcaaaaaagagcaaaaaactttacatgtaatgggtggagccttttctttttctttttgaaacaaatcaactgttatgtccaagaaatttttcttagctatagcaatatagtcaaggttgtcttaattactaattgaccctgaaaataaatagtaaagccatgaaatgttacacttaaagtcatgcccgatatcaatttgatgcctaacatagtagattttttttttaatcttttaagcttatataaggtatgttcttgatttgtactcgatgtatcttaactaggccaactgatccaacgtttatttgttacttgtgctgagtagttgaaggacatggctgagaggttacctgtaggagctgctaggactgtgaaatcaccgactcttgcttcttcttttggttccaatccttgttccaatgacgttatctatgcttccattgatcggttaaatattcaagcttcaagcccagaggcagatttaactggatcaaattaccagttacattcaaatggatcaagcactgtcagtagccgtagcacaggacacactaaacagagccagtcagattcaacaaatagaaatgggagcagaactaaggacagtgaatcccgtaatgaaactgaatgggttgaacaagatgaacctggtgtatatatcacactcacctcccttccgggaggtataatagatcttaagagagttcgcttcaggtatgcaatgctctgtagactttgtttctctgtcagaacttcatctgtgatatttgttaatgtagaatatgatatacttccatagaagaaaaagtagaatataacatggtgttaatgccttgacaaaaattattcctacgtcaatgacacattttgattctaatggcaatttggttgcatgttcttatgtttcatgtctaggacagttgcatatttcctctatttgaattttgaaagtagaaagtaatttcccaccgtaatgtttatagttttgtatctggtgggacaattcagataactacacactatttcacgattaacaattttgtaaccttaatgttggtgattgcagtcggaagcggttcagtgagaagcaagcagagcaatggtgggccgagaatcgcggaagagtctacgaacagtacaatgtgcgcatgattgacaagtcttctgttggtgttgggagtgaagacctggctcattgacatgacaacctgtaaatgagatgtttttcgacattttggctgggattagggcaagatcgaactgatcaattacatttggcttccatctagtataaaagcgacgagggaagcttagggggattggcatagtaggagagaaaatagggattgattgtgattttgtaattcctcttcgttttcttctttaattttccactttgatttcactttccatttttttccctatatgatgtaccttgtgtgggggttgagggtgagaaatgtaaattcttagtaggttgcaagctctgcttgaaaggagctgcagtgtaaatttcataagcgaatgcatttgcaaatttttcttctacacgggatataaattccctcagccatgggaaaaacggctctaagtagttaaatatacatggccctgccaattgcatatttcatatttgtattctttttttcctgctcttgcacttgtacttgtagtaagtaataccgagttggggacatatctaacgactaacgagcagagaccctagcggcctgcgccactttatttattaatcttaacaccgttgcattttaattgatataggagttatttatattttaaatttcatattatatgttgaagtaaaaaagtgctatgaaacattagttaatttttaaataccttcgtgtgtttggatgggggggatttgatagggtaattcaattttttaaagattgcttctttgtaaaataaggtgtttggataaagaatttaagaataattttcgattttagtattttaataaactaaaatcttaggatttcaaattccttcaaaaatttaagaaattgaaattcttgatgcagactcgttctcggtatgctttgcttctctcacgttgcacgcatgctctcatcgcaaggctctttatgttgtagagtaggatataatgcctcatgttacgcccttgttcgatatcgatgcctattggttttatgtttatggactaaacgatgtttcttggtgattttgaattaaatagatgagatttctatgtttggatggattcgtctatgtttttctgaatgcaagtggtgttgtgtgtaagaatggttcttggtggccctacaggtacaattgtagtattaagcctccacaaaagggttggcaccatgaatatgaaaattcatgttgtttcataaagttttggaatgctgacagaacataccaaaaactggttctgcctttgttaccctttaatggtcattgatattgatcccaatacatatacatccaacattttcttttcttagctatctacataaaatgttgcagttgaaattttagatgcatgtccaaaattcaagtttgcgatgagatgtgagcgtaatagatgcatgtccaaaattcatgtttgcaactagatgttaaaaaaatatgaattgatttgtgatgggggtgcctgattttgtaacaagcagccacaagggtttttggatcattgtggtgtgctgtaaggaggagaatatactttaggcactactctatttgttgaagattttaagtggaaatgaaaaaaataaaataaagggtgcgaagttgggttttctggaacaagtgttgtaggattaatttcatgatatatttatgatgcctattcatataatgaataacttgtccagtacttaattgctatttcaattcaggataccaatttaatcattcaacatatgttttctgtgagggttaagaaaaaacttatttatcttcaccacagaattgtatatgcttttctgttttcataaaattgtctcatgcctatgattttctcgtttacttttatccttccaatgaatatggtccttgcacttgacttcttacataattttaattcttcctattacataattttactaatctttaagaacatgcacttaggatatataactagctgctacatgtatctagcttcaacagctagaatagatatgtaactcattttataaactcttgtacataactactggatttgattgatgtaatctatcttttcagcttaagtgagcacactacccctataactttccctgatataatatgattgatcatgataaaaaagatgtggaagattaattattaatgatgtatcattgattttatctttttccatgataccaatgactaattattatcaatgtctgtcatggcttagaccaagtcttttattggtttggcaatattgtatcacataaatttacagttttaacaaaactatcaaattaatatttgttgataaaaaaaaaaaatgacatcatgccaacagaagctaattattactttactttcactagatttttaaacactttagcactcagtaagtgatacgtatggactgataccaaatgtatagtaattgaaatttgaaagattttaaatggtaaagcagtgctaaagataggattgttgaagatagagtagatattttatctagttgtaattggagttggataaataatcatggctacatgttttatctagttgaaaattggaattaactatttgactccaaatcaagggttagactttaatttgttgagtgagaggttagtgtgatactaatgagtacataggcgtgcagatagtgttttttgaaaagaaaaagctgagcgtgagagaagacgagattggttgtatagagaagagagcatgcgatgctattagtggtttcctgaattcgcatataggcagtattgtgcttggatatatatggaaattaagatgcatagacagagacaaataaaacctgcaagttgtaaccgctaaggacttggaacgaaaaaataataatatatttaatgtgaaaattataagaaagtggaaaaaaaatcatggatagtaaaatttattgtctcccaaaaaaattattttgacttttaaattttaagttccttaaggtatgagtgttattagacttgatttttttaagaaaaatttcatgttcaagtggatgaataaaaatgtaatttaaagagaaaaactcattaaagataatcgaccaatttttttaacaaagattaataaaaaaaatccatgaatatatactccataaaacaatagattccttaactattgtctttaggttactaattaacatttaccatattgtattatcaacttcttacatgcatttttttaggggtcactttctnnnnnnnnnnnnnnnnnnnnnnnnnnnnnnnnnnnnnnnnnnnnnnnnnnnnnnnnnnnnnnnnnnnnnnnnnnnnnnnnnnnnnnnnnnnnnnnnnnnnnnnnnnnnnnnnnnnnnnnnnnnnnnnnnnnnnnnnnnnnnnnnnnnnnnnnnnnnnnnnnnnnnnnnnnnnnnnnnnnnnnnnnnnnnnnnnnnnnnnnnnnnnnnnnttaaaacgtagttatagtaaaattcaataaaaatacagattatatattataatatatttttagttcttttaaaataagtaaattttgattttgatcatggattttttattttaaaatttaaaatatttttgttcatgtaaaatgagaaaatttcaatttcgatctttgtataatattttttttttaattttcattcctccaaaatctgagaccactatatttaatatctaaattaacatttgagtgcataaagaatatttattttagatttttaaaaaaattagaagagtcacgtgcccacataatatcataaacaactagtgtgtgttatcgggaacgataaattgactttctgttgaaaacataaactgttaatgaatacaaaggtaaaaataatgattttatatctttttgatagaaaatgaattcatatctttaagggataaaaaattaaaaaaaaaaactgatgtattttatgcatagttttaaaatctggaccgacctatcgaatcggaatttggtgattaaatcgggtcgagtaataagtttgatcggttatgtttttgacctgaaataatcgattgacttagtcgggtttgtggtcgaaccggtgacccgttggtccatatcgggttacttatcttcttcttttttcatttttttactttttttttattttgagttaaattgataaatcatttattgttgaatattttttgtggctacaattgcatttttgtttagttaaattaatttagaagtgactgtaattgtggttgagttataggtgaaattgtaatcacaaatcattttttaaaaatgtcatttagaactttagattgatttttttatattttataatttacattgatatgatacggttatgttttattttagtgtaaatgtttatatatacttccattgatgcctttaatgttaaatgttagagataatagtcattttttaatttgtatttttatattttatttgtgcttttaagatttttgaatttgaatgtattagaagaaagattttaagatagatataaaaaatttatattttttttattataaatcagatcatacaggttaattagtgatctaccgattcgaccactaactcaataatccaatactataattagatcagtaatcggatcgattttttaaaattatgattttacgttaactaaaattatatttaagtttttttaataagtgtccattgatcttgtatcttcgtacttttctttaattttgaatcaacaaaggagtacataaaatagaaaaatcacattttttattcatcacaatattttttcaatttatgtggtgctataaaagtataaaaacgtaattatatcaaataatctttatatatttagaatatattacaatgtactcaataaagaacaaaatagcataatttaatgaacggtgaataaagatatattgatgttaattcaatgaacgtttagataagatcataagaatatgtctttaatgaattaattaaaactgggagggtgcagtggttggatttttggggtctatagcaatacctgacaacctaaaagctgtgtgctgctgttcagttggtgtccgaatggcttttgcttcaacacacaaaaaaaaaagtaaatatttctttgctctcgattgatctcaattaaaaattttaagtttttttcaccttacttttttattcttgattggaacttagtataaaaataaaaatgagtcattgaaattaaaatcttgataaaatgaaaggtattgtaaaaacagtaacatggaaggaagtaaaaagttacttaaaaaaaaaatctgaaatcaggaaaaacatttttttcttcttgtatttgagaaatgaggaagtaggagctttggtaaatgtggaaatcttatcttaagcacacttcaggaatacaaagtggacaaagaaaatgcagagagtgatggatcaatggtcagtcttcatagtaaaagcacccatgacaggtctataattttgtaaaacactcactttaaaaattaattttgtaaaataattcattttggtaaaaaaaaatcctcatcagcacttcttttattcatcatcatcacattcaacaggttttttcagctttttttactcaatataaatctagctagctatctcaattttatgtaaatagtacaaagtaaaaatcagttacacaaatactgtaagttgataacttattaggggtatgaatgtgttaaaacttaaaagcaactttatacaagtggccgagttgaaaattaaagacagtaacacatattcgccaattaagctagtttaggtctttgatcgacttgtcttttggaagattcattgtgtggaatgctgtactgaacacgttcatttccataactgaacatgcatatgtatatattttcatttgttttgaaattatatttttaataaaataaatttttgtaagagctctttattttcgatttagtgaaaaatttcacaaatttagataaacttattatagcgtaccaattaaaattatagtgaaaatattaataataaaaaagctactttgaaggggggaattagtatattttgttcttgtttactatattttgattaataactttaataatggtgttgcgattatattttaactaagctaagataacaaagttaaattacatttttgggaaatattaaatatttaaaattttattttatgaaaatttagaaaatatttaatgtgtgtgaaaataattagttagatgattaaattaagacaaatattggtgaaggaactaaaaataatttttaattaaaatacataaagttgtgttatcattcataatttttttcttgtgctgtactataaattttataataaacatttctattttattttttaaatttcttaactaataactaacaattctcttaaattaaataactaggtggagcgcatgttgctaaaagctgtattttaattagggttagatggtatccgacggttgacagcgtttgagtattcttgatcgctagattaagctgagtggggagcttcaatttaatactcttgtagtatattatatatatgcttcttcaccaaccgttttttatcttctgtataaataaaacaaacgttttgtctcttttatcagccttgctcaaaattctatttcttcttcatttccctcgaaaatccaaggtatgtttgttggaagttaggcctcattatattgtgcatacatttatatgttgtttgaaatttgggattattgggggatgaactattctgattaatgttttgtttgatggttgttccgtcatcttgctttggcattgctattggattaaattttctgctcttgtttgttctgtgggctgtggtcaacgatgcatgtttcatcactgtttcggaaggaaatcgtataatgaacaatttgtatgcgcccttatatatgctctaaagtaaaattttcttaaatgcagattttttcagcctaattagaggtttggagtttgaattcctgatatatgcaattgcactatataatctattgagagagaaatttatccgatttgatcaggattgtctggagcaggtgaacaaatggcagagcatagagaacataaggttgttgataaatctcaggtagctccagctacaagtagaaccatgtcatttcctctatcattccttgacttgccttatgcacgtcctatttatgtgaaacgcctattcttctatcactttccccatcccaaacacattttctatgaaactatactcccttctctcaaacacaacctctctcttacccttcaacatttcttccctctcgctgggaatctcctgtgtccaccacaacctcacaaacccttcattcgctgcaccgatgatgactctgtcaccttaaccatcgtcgagtccaaagcatatttcaaccatctctcatccaaccaccccaaaaatctcaaagatttggatcacttagttcccatgttgacattcacaaccgtgcatggtgatgatgatgaggaggacacgtatgtttccccgttggtggccttgcaagtcacggttttccccaaccatggcctttgcatcgccataacaaattctcacgtgatcatggatggaaggagtagctgttatttcatcaagtattggtcaagcatttgtagaagtggtggagttgacttgacacccccttgctttgatagggaactgttgaaggacaccaagggacttgaggccatcttcttaagagactactttgaagagaggtcaacttggaaggacaaactcaaactcattggtcaaactcctaatcatgatgaggactatgttaaggcaacagtttcctttggaagagatgatattgagggaatgaaaagatgggtgctgaaatcagttggaaaaaaatgatgaattgatgaaagcacccgaatatctatcaaagttcgtggttacatgtggtttcatgtgggctagctgggttaaagcaaaatgtagacatgatgataataatgatgaagatgaacaagagatcatgaaagaggagtactttcgttttgcagcagattgtagagaccgctttgagtatccaataccagcaacatactttggaaattgcttaacaagatgtcatgcattgctcaagagaaaggagctaaagggagaagctggttttgtgaaggcagtgaagggcattgcaagggcaataactgatatgaaagctgaacctcttaaagatgcagaaaactggaaggaattaagtaggaagatgtttgtattgggaagtacaatgctagttggagggtcacctaaatttgatgtttatgagactgactttggatttggaaaacctaccaaagtggagatgatggtacatccccaaatattgtgtgtgtctcttgccgaaagtggagacggagaaggagggatagagtttggcttggaatttacaagtattggggaatttgagtattttagttccgtcattgagcaaggacttgtaacattaaaatcctaaatgattgcatcattgcatgtggtccttgtttccttttctgctctcattaattcagtcactctgtaatgtaaaaacaatatggagtattactactttttcattaaagttggaataaatatatcttttttttcatctcattttgagactaaatccgacacgatcagagttattttttagtcgaggttgatcataattattttgtctgaaattggctgaagcaattttttttttttttgcaaaagtttattaggattttttccagcagatattgattagggttatttttttagctatgcatctaaaaattttcgatccacgttcgtggagattgttttttggttaatattgactgaagttggttaaaattattttttggccaaacattaacataggttatttttttgccaactttaactaaattttttgaccatcatcatctaatgatgttttttaatcaacatcgattaaggttgttttctggctaacatcttctagagttttcttttattgatattgatcaaagctatcttattgctaatattggctaggattttttcagccaatgtcaacaaaacttttttttgggcaaaagctatcttgtagagtgatggacataatttaatttattaaaagaagaaaataaagtaatttaatttatataattaaataagtatatatatatatatatatactccctcttatctcaaatataagaaaaatattcttttcttgatttcaaataaaaaaaaatcaattaattttacattatttaatgttagtatctctaaaatatcctttatttaattgaggtattagttttagtgatttttctctattttagatatcaagttccaataaaaattaagttaaaaaatatttattaaaattagtataattaaatataattaactaattttattcattcttacctcatctctttacttcaaatcatgtgatcccttgaattaacagtttgatgataaataaaatgagttaaatgtgttttagtaaaagaaaaaaattaatgagtgtgaataagttttttcttcttatatttaaagttagtgagggagtatatatatatatatatatatatatgaaggggtaaaatgtttattaggaattaaatgggaagaaggcaagttggtaattttgaaattgcgtgaagggctgtgttgtccaaaatacctcaaatatataaacgatatgaccgtagcgggcttccacgaaaaattcaaaatccaacgaacggtaacgttttcggtcttcttcttcttttccttccgcatctcgttatcattcatcttcggtgttctctactcgcggtctttacttttaacctttctgcgatttcgggtttgttatattgcttctgtttgctttttgttatatttctgaattctatttatttaatgtttttgaattaggatttatgttctttaaagttagtgtacttgattgattgatacgtggaattgggaaatatatgagtaaacggcactttcctagaaaccttatgggattttgctatggaaaagaaaatattagcactagcaaaggtttttcttcctcgtgatgttcataaccttcttttttttttggtttttgttttttattcacactaatattttaatttgttttgcagagtccagtatcaaagtctttgctctctgaaaaaagtgaaataggataatggctaagtttgttgctcctggccacctgattatcaaagatgaaaacttgaatcttcattcnnnnnnnnnnnnnnnnnnnnnnnnnnnnnnnnnnnnnnnnnnnnnnnnnnnnnnnnnnnnnnnnnnnnnnnnnnnnnnnnnnnnnnnnnnnnnnnnnnnnnnnnnnnnnnnnnnnnnnnnnnnnnnnnnnnnnnnnnnnnnnnnnnnnnnnnnnnnnnnnnnnnnnnnnnnnnnnnnnnnnnnnnnnnnnnnnnnnnnnnnnnnnnnnnnnnnnnnnnnnnnnnnnnnnnnnnnnnnnnnnnnnnnnnnnnnnnnnnnnnnnnnnnnnnnnnnnnnnnnnnnnnnnnnnnnnnnnnnnnnnnnnnnnnnnnnnnnnnnnnnnnnnnnnnnnnnnnnnnnnnnnnnnnnnnnnnnnnnnnnnnnnnnnnnnnnnnnnnnnnnnnnnnnnnnnnnnnnnnnnnnnnnnnnnnnnnnnnnnnnnnnnnnnnnnnnnnnnnnnnnnnnnnnnnnnnnnnnnnnnnnnnnnnnnnnnnnnnnnnnnnnnnnnnnnnnnnnnnnnnnnnnnnnnnnnnnnnnnnnnnnnnnnnnnnnnnnnnnnnnnnnnnnnnnnnnnnnnnnnnnnnnnnnnnnnnnnnnnnnnnnnnnnnnnnnnnnnnnnnnnnnnnnnnnnnnnnnnnnnnnnnnnnnnnnnnnnnnnnnnnnnnnnnnnnnnnnnnnnnnnnnnnnnnnnnnnnnnnnnnnnnnnnnnnnnnnnnnnnnnnnnnnnnnnnnnnnnnnnnnnnnnnnnnnnnnnnnnnnnnnnnnnnnnnnnnnnnnnnnnnnnnnnnnnnnnnnnnnnnntgactttgcattctgtaacagtattggtggttactgcactcttctcttactgtgttagttttgtttgccctttgtgtttgctcgggacagagactactaagtcgaagaattctaagacaaatggaaaaaaagatggttcagggattgcaggtcgaaaagctctaaatgatataacaaacaaaagttcacttcaccaccctgaagcctcggttaagaaaagaaatttacccaaggaagatattaatgtaaaggaggaaatgttcttgcatgatcacaagaaatgcattgaggctcaaaatgctactatgagaaatttcaatcttgagaaagttcttccacaagatggtatggcttttacttcagtattcgatgtatggcatgagttgtgaaaatctttatggtgcaattaaatcagtttcttagtttaccacaagatgattactttataattttgacatcaattaaatcaatgtcgtagtttttaactttacagttacaacttacaagtaaaatgtggtattgaatattatgatgagattgtgcatgtgatatattggcatgtgagtgagttcttgagtaacttatttctagcaatctttattagaatacaatgaagagagaattgacatttggcattgaagttggcattagtaacttttgacaaaagggatttcttgtgagatgatttgatttaaaatatatctgaacatattcctattcaatgttttggtgaattaaatttggatgtccctgactatcatgttgatggttattattattagataatgttgataaaattcctaacaacattttatctctgcagattccatatctatcctagagctgataaaggtaatgatgtatctttctgaccccttttttagtttgttttggttacatgtatttgaagctgaggggtgctttgaggacaaccactgaatatgtactatttcattttgtcatatacaatgaaaataacatgctttaagatgatttaaatcttgattaaagcatttaataatcaatccactacaagctgatatcaatttttaagcattttgttgattagaaactttttactgttgcttcccctttgtctaacatttgctttatcatctgttttcctttttcttgtggcgttaggttcctgattcccctcaatgctacccagaaccagttgaattgccaatgtccaaattttcagattggtttgaccattcaatgcattggagctcccctccatcttctccgttgtcatgggactctccaccatctccccttgcatggcaaaatgaagcagttgaatttgttttgaaggaagaaattgctgtccaagtgtaacctactatttcttttgtcgtgtaacagaacaagtgaatcccaccgttgattgagccttgttttttggtttctttctctgtatcgcttcataatcctagtcccttcagttgaatgaatttctagtttttgtcaaaattaaacatcagatctagtgcacgagcaatgtggaacaggtaatgtagtgatgagttagtgcatcttatgcattaaacttccagcgctaaagaaaagaccaaaaaaatggtagcaattccaattgtattctgtctaataagacattttctgaagcctggtaactgcatatcaaataatcagtataccatgatatatgctgattatttcataattcaccaaaaaaaatcagtaaattagaatgctgcaaaatatattatttgggaggattgctgagagtagaacactatcaaggaagaaaaggaagttaaaagaaatagttcaagaaatgagaaaaacaagcaagtgtctagtggattccttagtaatacaatctgtcaatctccaattatataaatttgacatgtggtttaatggtctaatgtcgatactagttcttgttaagtaattaccttgtctttaagtgctgaattgaaaaccaagaatgctatggccaaacaaaattacataggaaacatcaatgtcagatgatgtatgcaagatagctttcaaattagccggtggaaaattcaacaattaatactttaaaaaattattacttcagaatcaaataattagtatttatgatagggaaactcactgcaagagactcttgtacagttgtactgaggttttgaaaggaaaaatgtacgtgatcttgttttcacatgctaatggttcaaatattgttacatgatttttaattcgagtaaaaaagaatgctgcggattaagagtggaattagcataaacttgagtgatgcattatcttcaggttcttcacctttgatggaaggtctctctactgaagcctcactcttcaaatcctcaagcaattgcaactcctcaaaaattgttttctgtggtttgtcttgaccgtgtacttagagggaattacacggaattttccttcatttaactactcttgtttatttagtgattcttgtgggataggattaggaagcttcaagggatttcctaaaagtgccttctttgtgatggcctaccttggtcctatagggggtatttcgcctcaaacagaattgcattattttcttgattgtgccttgaaacaaccgtgaatcagttctttcttggatgactatggtttgagcaatttcaagccatcatgtcaaatgataacaatcaacaagtggtaaaaattggcgtgaattgtataagttttatactcttgttaatcttgaattgacgtacgtaaatctaacacaaatattggatatgataccctaacaattagaaaagtctcacggagatcagcagtgaaagataaattagccttcacttcccaattcgaattctgccaatgcaacaatttatggtcaattttaccagcgcacgcgcagtcacaaatgttgactttcctaactccacctctaaggcgagtgtcctgattagcttaactaaactaaaaaatgaacattagtcgtttttgcactgctctcattttcgttgtcaatgttgtcataggagatttccaggtgaaagcacacatagtgcgagatgccaaattgttgtacatgcctcccaaatttgattcaatccaggtggtataaagatttcgttctaatctatataaatatttcaatcctcacatatatgttttaatttcgttcgtagtctttcttgttgaatgcgtaaaatcttcaacaatgattggatcgaacttgaaattattgatacattattattcaaggttagacgcagtgcagcacggcttaaataacatatctcaaagagagtagcgtaattggattgctttataagaaatgtgggggaggggggagggttattgatagagataaaaacattaaaggaagtaaattacagaaatgacaaaaatacaggggtatatttttttttttaaacatgaagacacacaatacatcatctctcatctagacatcatctccaccgctttgtccacattattgttcacgccctccttttcataaaagtagtaagatgcagcaaaatcacagtattatagatgtttgcctcttacataccagatcatgtgactttgatagaaaggattctgttacttttttctagacacagctgctgcaatcccacctgctataagtcctacagcagttgcagcaatgcctaggccaatgacaccatctacaatgaaagaaaagaagcagtcagtgcttatcctcttgctcttggcaagaaaaaaggagcagagaaaaatgttagtggaaaatcaagaattgatgggaacctttggtgatcttatcctcgattgtcgtcttgagtgtcactgcctgcctccagtcgggtgcaatctaaggaagaaaacattgacatgatatcacattaaagtacatagatgctgcattggtgcatatgcaatagatcaaaatttaaaataaaaaatgctgtgctttgcccttgcttggaatttgttgttgggtttggagagggatatcacaaaaaaaccccaaaacttatagatactgaatctataactttttcctctataacaaagaaacaacgcatcaaagacttgagtatatgaaaaggaaaagaggagtaaaaaagacttgagtatatgattctagtgaaccaatgtctacattcaacaaccagtgtctaagtgttcaagatggttaactcaatttcaaatcgtgtggagacatcaggtaagagatgtcccaacagacgatgtattgtattcctttctgtcaacgcattgttacagtaaaataagtacaggcttcagagaatgcatacagaagtcagattctattccaaaacatgtttttgaatgcaagatacagatgacaactagctacacattgaaactatattagcaaatatagttcgggcattatgctagagagtagagacaccacacaaacacaacctccttctccttcaggtccaaaacatacacctctgccacactgattaggggaaatcaatagcagaaaacacaaggttgtgatactttttttccacaaaaagaaaaggcaaaatcattatgctgtataattaggatttgtctcctctaaagtaagtcccgagtaaaggataaagtaagcaatcttagtcatcgatgagaaactcattggtcgatactgcatggacatgttacatgtataagaaaatctaaatgtgactaaatatcacgattgagattccttagagagatggatacataccgcgaggcacctgtcgacgagatccctactccttgaataatcagaatttctatagtatccaacagccagaagataaagcttctccctttgctgcaatgggtcctttgtggcaggcaaagatgctgccatttacatgtaattacatgtcatttaactatcaattaacatacatacatacataattgaattgcatgatgaaagagtaaaagagagagagaccttcaagcatggctatcccacggtgcacatcttgtgggtgtttggagtgaacaagagcccatgataaacgcaagagacagtcttgcatatactcttcagatgattgtttttctgcctccaacacctctctttcacatccctgccagtgcagtgccacacacaagaacaattaattaatcaattgcaatctcaaacacttaaaaacatacataattgataagaaatagattgaatagagaaattttgagattgacaaccctagcagagaaagagcatatgaatatgaaacatacagcgacgacgtcagagtcacaataaggaaggtggtctttgccggagaagaactgacccaccgagtccacgatcatccctagcttcgcttcaagtttcgccatttctacacacaccgagttcaaccgagtttccagtgagttgactttgcttcaccaactcgctccctctcttcagattaattgccgcggacaccgcctcctaagtactaaacccccataaatataacattttcttttctgcaattattatttattagtcgctgatggtgtaataaatactttttttttcttactgtatttcttgtgatctggtcataaacttgtgtaatgcaaaattatgtcgcgttttgaaaacttcagaattaagtcatttcgtaatatcttgtgacaggcaaacgaagataggtctggtgggggcagaaaacaatcctcttgctaaaaattgacacttcttcgaagttcgttgcattttatattttaattgtttctatgatatttgcaaccgatataaaacttacatacattttttagttcttataatttagtaatttttattatttgttattttaaagttattttttttattagatgtcaaaattaggtcttttcattgttaccagttatcccttagcttacttatttgacagacaaaatctaactaatcaaatatgtggaaaatattttgcatatcataatatcttaaaaaatgtccatattagaatttacatgttttaatatatgaaatttcgtattatttaaaataaaaatattttgatatctgaaatgcttttcgtgttattgattagttataaaccatcctatcaattaagtagatgatgactaatgtcaacaaatgttaaattttgaatgtcaaaccaacaaagagacccaatttcaaaattcagtgtatgggaattaaaattgcatcaaaataagagcactagaatttaggatcccatcctagtttcttacatgcatttcttccctttatatttgtgttttctcaaaacattgttattaacacaaattgagacaaggacgaaagagacagctagggaaattgcgaggtgccttgctaacattaagagtacacttctgaggtgaggttcacttcttggcttcatcaaagtagttgatacttacaaggccccacccccacaatggttagttcataatatatgtttacttgagcataacgcataatcatacaaataatgttgagagcttcacaaacagagtgtattaatgtaagaatgagaacatatttcttattcatagcaaactagcaattttgagagaagtctcttagcttcctgtacatatctaattacttacaaactacaaatgaatcctctatgccaagccaaattgacaaagaaaacaaataaataaaattgaaaaaacaaagcaaaatcaccatgcatatggattttcacaaactaataatctctatcccccactcacttcttttctggttcatgtaaagagagcctcagaaatacaactaatctcaatctcataactatttggagcatattagctacttttgacaagtgaacacgctgtacattatgtaccctgcaaagcattggttccagaaccgtcttgcaaagtcaaaactaaaatctctgaggacaaattcctaagatgctcaagataaaagaatggcttcacaaatctcccatcattctatggtttcattggtacctacagctgcatgatgtagtataatctgaagggcatctcattcagattctccagggaagggttctccttcccactacaattaaatgaattaagatctttaaccatctaatacaactcttgccttcttgagcacatattactctcgggagaaccattttcatcatcttgcttaagtaatgagtccccatttccggtaaaaagtcgggcagatagcatagccgatgaagaagcactgcctgcaattgtttcaacacatgcaaatatgaaagaatatcaattatggttccatacattcatctggatagtcagtggcggcagaattaagtgctatgatcaaatttatcacacctctaaaagaagagcttctctcaaagtccttagttgcatgcaacattattgttccagagagtacaacaatgaagccacatatttctgacacaatagttccaccactttggccatcccaatcctgcaagcattatttttaaatgtaaataggttcttgtaccattcgtagacaacagaaacatcttatgcatttagcattaaatgccaaaactagttgatcataccttaaacattattacactggctagtattgtaagtgttgtgaacatgacatagtatataggagatacaattgctgtgttgaaggtgtcaagagcctgaaatattacaatcatgtcagtgaagaataagtgatccaaaatttcatatataagaactttgtatacaatgcacagagaaaatctcaattctctagaattgatttctttttccattgaatataactcagacatcattttgaacaagacttgataaagaataataaacttcacaaaatataatggatcactatgtcattttgaggagttctcaataccactagtttggcaatatgaatgccagtattttcaacaattaaacaattctttcattttaaacatctaaaagatcaagtcattacatcaagggatagcacattcaaacagattaagaaaccaacaagagtaaagaaacagaaaagtaaccacctagccaggctaatgttcacgtgcacatgcttactaatatgcagatctcttttgtataagaatgatagagtacccaacactaaacctcagaactcagaagagattacataatactacaaaagtaaaatcatgttgtatagagaacttacaatcaattgatatcggaagacaatttctgataagattaaagattatcagtaagcaatgatatagtaccaaacaccaaacctttactagttgcatgatgtaaaacaatttacttttgttgcatcttgatttgacttttgttgtattatgtaatctcttagttctgaggtttagtgtcgggtactctatcttgagttctgggttctgagttctgaggtttgttctatcttgaatttacattccataggaattcgcatgttgtaatactgtatgttgtatggaggatttaatatgcaactagtaaaatcatcggagccattactgataatcttatcagaacagtccacccatggaatgtaattcccctcctactgtctgataagattaacttaaacaaaagaaatattaaaaagaggtatgaaaagaattctagatcatttaaaaagcttagcagaatttcatttcgtaagatttttcattctgttttatattaagttgtcatcttccttaattgtatatgaagttgtagctaaacttccctgcattccaattcaaaggaatagtctggcaacaagaccgcctctatttcctcaaaacaccaaacactacaaaatgataaacaaaaaaactcatatataagtcacaaccaaacagaagcctcaaatctgagcttctttgctttggttgattcctaatttagcaatattataatatatgccaaaggtcaaagtaaataaacttattttcctgacttttccaaaatctcaaaacttgagtctaagcccaaaaatactcctatggaattgatgcctacaacagcagccaagccttatcccattaggtattgggataattaatcaatccacgccattaagctctattcaaaactaattttactgtacaattttttagaagaataaactaatgttgttaggaaccagaatagggatggtaaaactaatgttgatactcaattagaactatatcagaggtataaacctctgttacagtgctgcaatccaagaaaatgaaaaagaaagctagggtaatagctggagactagctccttacacgatgaacaatataaaataaacaaatagcagaaattagagaacccctttcctgaggaagaactagcttcttcactcagggtagccaatattgataccaattttatcattgtccctattcggttatcacacccatcatataatccttctcactctcctccctctatccccttgccaccagtaattttctgttattttctctctctccttcaaccacattcactgatccacatgttccactcttccccactactgcctcctgtgaagcttgtttattgtttcgccataatcactcagatccttattcatgggcgaaatttcacttccttgccactaccatacccatatagtttgtaagggagtctccttcatatatagagacattagcagttttgttgcatttttcatttttgagcctcttaggcccaatgatatcctcctcgctagtatttcttcctcctctttacaataaatctttcttttatcaccccccacgcacaaaaaaaaaaaaaaaaaagttcctatggaatatatgatcaagatagaatagatgaaacacataaaatataaaagataaattttgcatcctatatactaacataacaacttaagaatttttcaaatgtttgaactacctaccactagtaggtcattgataaaaatatatgcacgacaagcccagtgtgctaattttaagatcatgtaacaaaccttattaagataattcatttgcatgatgacagatatagccacaactaacataaaaaaccatgtctctgggtagattaactgatttttcccttcaaaagttaatttcaaagaagttccaagggctttaacactcatcacctgcaaaattatagcaattcagtttagatcagccaccatattattgcagtgttactacaaagcaaacatttttcagtaaatatcattggttattatgacataaataattatccatgtaattggggaaagggagaaaactttatagaccatagcagtctcatataaccatacaactaaaatatatataaagaattatatggaagctgaaactttatttatgaaatgaaattcattattagaaaataggattcgacatgaaatcatgtcccttagattgtatatgttttaaacttaataacttcgagtaaacaaaactttgaagtttaaatcaattatcaaacagaagacttagtaggagagataacagttaattaatttacttacagagagggaacccatcaatgaacaaatgccagtaaaaactagcacattcgtatgcccgcatcttggtgcaaaatggaagaccagaatgaaaaccaatactattactgagcccacatatgccagaaaagctgcaagcagggaggatatatttgtaatcaaggaactacaatgaattgcattcaaaaaaaannnnnnnnnnnnnnnnnnnnnnnnnnnnnnnnnnnnnnnnnnnnnnnnnnnnnnnnnnnnnnnnnnnnnnnnnnnnnnnnnnnnnnnnnnnnnnnnnnnnnnnnnnnnnnnnnnnnnnnnnnnnnnnnnnnnnnnnnnnnnnnnnnnnnnnnnnnnnnnnnnnnnnnnnnnnnnnnnnnnnnnnnnnnnnnnnnnnnnnnnnnnnnnnnnnnnnnnnnnnnnnnnnnnnnnnnnnnnnnnnnnnnnnnnnnnnnnnnnnnnnnnnnnnnnnnnnnnnnnnnnnnnnnnnnnnnnnnnnnnnnnnnnnnnnnnnnnnaaaaaaaaaaaaaaaaaacaagacagtgtattctaacctggttgagtagccatattccatatttccagaacagatgtaataggttgttccttaggagcatgaataacaataatgatactaccagcaatgcacattatacagcccaaaatcccaagattgtgtagcttctctttcagaataatgtcagccaaaacagcactagaggataccatgcaaacatcattgaagaagcaaccatgttatgtcgccaatgttagaagctagcaccaccttaattctcaatcaacaatgaaaattaagggaatacctcacaataatacttaatgcaccaagaggggtaactaggactgctggagcaaacgcataagcaacaaagtttgcaacctctcctacaatcactgtacaataaaccatacagaaacagattctgcaagaaatcagataaataaaaaatgaccgataaactaaaatttgcatattttaatcaaccttcaacttcactacaactgatctaccatatgtgagtgtataataaagaaatctagcaaataataaagcatctgaaacatcaaatccaggttccactatacaatgcaaaacgaaattaattcatcctaacttatgagattcaaaaactctattaaaaataaaatccaattaattccatacaagattggataaaatcaaaaccaattatgaagacaaaataaaaccattaaggtacaagaaaatccagattctacccgaaaaaacgaaaaaataacaatactaaaagcatagaaacaaaattaaacagcacttaaagcttacttgtgatcattcccgcccaccatagtggctccaagagataataatatccaccaacacctacaagacgacaaaaaaattacaaagacatgcataccataaaacaagcttccaaatagaaattctaatagaaaaagaaaaaagagaaattccctcaccagccctgacaccagaaactgctgcagctcttctaaggccttgctttttaatgataaaacttgccccgatgaacccacttgacaccaaagctagtatgagacctttcagattctccttggacagacccatctcgaaaaatcgtaactttcttctgattttggatctcttcttctccttctcttcatggatgagacacgagacaaacacggttcctcagatcattatcattgcttgtttcatgattgtggcatggaaagcaggaaaagatatagtgtgcaccaccacaaccttattattctataccacctgtgagggccccacttgttatttttaaccattttttataatagtattagtatgctcagaatttatgcatttattgcggacattaatgaatacaatgagtttgaatcaaacatgaagtcttaatccaatcgttttttttctttgggggaacattcatgtttcaaagtttttaatgcaacctttaattgatttatgtttgccctcacatgttcaattgaattcttttaacaacgttacctaattgggatattgaatatattctgtttatcttattataattgttgtaaaacaaaaataattttaaaataattattattttaattttttaatataatattaattacattttttcattttcatcccttataatattaaaattaaaatatatatatatgatcactaataaatatttgattttatatatattctttattaaaaaagaatcttcgttttttcggttcgtgataaaacaaaaaatttatttttaatccttgacacttttttaatttataataaattattaaatttcagtgtttattttttgataattttttattttttattagtctttttannnnnnnnnnnnnnnnnnnnnnnnnnnnnnnnnnnnnnnnnnnnnnnnnnnnnnnnnnnnnnnnnnnnnnnnnnnnnnnnnnnnnnnnnnnnnnnnnnnnnnnnnnnnnnnnnnnnnnnnnnnnnnnnnnnnnnnnnnnnnnnnnnnnnnnnnnnnnnnnnnnnnnnnnnnnnnnnnnnnnnnnnnnnnnnnnnnnnnnnnnnnnnnnnnnnnnnnnnnnnnnnnnnnnnnnnnnnnnnnnnnnnnnnnnnnnnnnnnnnnnnnnnnnnnnnnnnnnnnnnnnnnnnnnnnnnnnnnnnnnnnnnnnnnnnnnnnnnnnnnnnnnnnnnnnnnnnnnnnnnnnnnnnnnnnnnnnnnnnnnnnnnnnnnnnnnnnnnnnnnnnnnnnnnnnnnnnnnnnnnnnnnnnnnnnnnnnnnnnnnnnnnnnnnnnnnnnnnnnnnnnnnnnnnnnnnnnnnnnnnnnnnnnnnnnnnnnnnnnnnnnnnnnnnnnnnnnnnnnnnnnnnnnnnnnnnnnnnnnnnnnnnnnnnnnnnnnnnnnnnnnnnttaattattcaatgataaatattattaataatagaatccatgattggaaataacatatatgtcattttttaatagttataatctttcctatttaacgaaaaaagttaattagtgtagtaaaaagcacattaatttttcaaataatttttgtatctttaatttgaaatatatttttaatatttttatcttcatttctttaaacattaattaacatttatcttttggttttggttttgcgtatgatttttcattacttacattagaaattagtcaacttctcaaactaaaagtaataaaaaaattcttaataatatttatatatatatatatatataacattttatgaagaatagaagttgttttagttaaaagtaaaattcgatgtggctaatttgaaagagaaaaggataaaatctaagtatattttagatataatatttttcaattaaaatataaattttcacttcaataattaatactattgaaaattggtttaaaataacaagtggggaccttacaacttggtctaatataacaaggttgcggttgtacacacatcatcaaaataaaactgcctaaaataatccactaattttatcctataaaaaattacaagttgtggcatttatttataaataaataaataaaagaacaaagttaaaaaataatacaaatagtaccgcttgttgcatttttttgtgatggtgtcggaaaaactaacgtaaatatgcgtgttgacttgaacgggtgtgcagtgcatgtgcacatgaagctcccgtgtggagtggtgcaggggattgaacagagggtacacgtgttgcattactgagctggccaatagaaaatgttgaagaagcatcttatggggatatcgttccatggtagccaaatgtaacgtggggttaatattttacatcctacggatacgtgtttcgtattatgtggtggctgaggatttcttgatgttggtcttactcacatctgggcatctaacgtggcccatcgcagcccaaaaattaagaaaatatttccaaatgctccataaatgaaaatataaattatttcaattaaggggaaatgaattttaagaattaataaaattaaaaatatatatcattaacatttgatacttgatagataagaaatattaatataagaaggaaaaattaagactctatttaaagtggttacgagtttttagtttgttgtttccaagctttttgtttggataaaatgaggttgaaggggcttttaaatgaatttcaaaatcattttaactcacatttgaaaatagatttctagttttatgttcttaaaagttgtttcttccccttttaatacattctgtcactcttcacttttcattcagttttcttctcttttccttcaactttcgcatgaggtggtaaaataagttgagtcgactaatttcacatggatctggctgaagaaacctactatactttcttagcttgatcgaaacttgttttgacacaaaaaagggaaaaattacaaaccaaatttttaatgagtttggccatcattttaaaatttcaaattaatgacatttttaacccaacttgctacagaccactacccatatcgagttcaagaatcatgatcaacctaacctaaacttactcaataaaatgtaggattaaagctttaaattgtgagcacaaatttattttgatattttttagcttaatcaaaccttgttccaatttaggcttattttgaagggaaaataatattttattttatgaggaaaaatattatatatataaaaagttttactcagtcatataatcacaacttatcatatatggtaagtttgttgaattttaaaataattattttaaaataattcaaaagatgatttacgattgaatgatagtgtaaaattgtttcattatcggtgcataaacattaaactcttattttattttgaaacatcattattaaccaaaacttgaaaataacaatataattagagttgtgaatattaagggtgttcataaaccgattcaatccaaaaaattgagaaccgaataaataaataaaaaatgaaaggataaaaaattggaaaactaaaaaaatttattgaatagaatttgattttagaaaccaattcaaagtaactcatacatatgtatactcatttctatttttatttcttatataaattatcatataacttatatctatttataaaaatatatttcattaaagatatttttactaattatttgagttaagatgcataagtattatattattagttatataattacgtataaataaaatatttgatattttaaattatttttattattgattatatatcttacattttatttagtattttctataaaaaaaaaagttataagtaagattaaaattgaaaattcaaatctctttaaattggattggatggaattaaaagattaaactaaataaaaaggtaagatgcatgcatgaatgtgtcaaaaaaaactacttagagttctcataggaggtgtgatgctctcggtagtggcattgttccatgaagtaatgtttcagtcgtcgaagacagtgttacttgccctcttgaacgtcatagtgcttcttttctctatgcgaaactttacattaccaaccttgttgcatcgcgtgacttcttctctgtctttggtttcatgttagatttttgtcaccgatgttaactcatcaacagaaggtcgaccttgagactaacttagctcgcttcttcatagagtttttcatccttcatccttcagcatgtatcagcttacacttacttatgggctctcataggagcagtgattgtttacgttgagatggactattgttgaaatacaagtatggggtgaagtctctcattgattaaaaatcaaaaagttgaataacatataagtgaaagaaagacaacatgaacattaagattttgtattaaagtgtgtacatgtcattagaatatatataataaaaccttgaagctgatccttggtagtacaaaatccactatggtcatggttagaataagaaattggacgatgatttgtgatctatgattagctcaccttagtcgtggttgatagcgcaatcatctttactttaccacgatcgtggttcacatgtcaatgctctaattgcatcaaaattgtatgttttcgagctctttttcacatgaaaactcttggacacgtgttgcacaaactaaaactaaactaagttttttccaaaaaaaaaaaaaatgtcaaaatgcatggatacaacatgaaaactcgactgacttaatgttacttacctcattgagcacaacaaggcttccaatgccttctttgtcgtcggtttcatgctgctttttgtcaccacaatgttagcttatcaacgataccttggccttgaggccaacttggtgcacttcttgatgtaactcttcatcattaaccacatatcaatcttcacctccctagaagctctcataggaggagtccctttttatcttcttttggagatggaccactgtttcactagtgtccttgcgtcatcaccgaagcttgacaacgacgacgcgtcggagcctggcgtttagttttcgattccatgtaatttcattttgattcagttgattttataaggtttgtcttttcatgttcgtgcacttcctgatggagtagtagttttcgattgtatttagtttccgattcaatgtgattttgttttgaattagttgattttataaggtttgtttgttcattttcgtgtttgtaccagtctggaatagtgttcttgttctttggttgttgtttgtttcactaatcaagtgattttacaatgttggtttcatcttgtttatttgtgttcctatttcttaatgccaccattaccaaacataattgatctgatctcgtcaattgtctctgcttattgtaacttcgtgtttttttcatttcatataggaaagctaattaactaaatggattggtggatgtgttgttttagttcttgttgatttttatcctcctatttttgttttttctattttcaattgtattttttagacgatcaattaaaaaaaggaaaaataatatataagtactttacatgtttaatagatacctttgactctcattttatctcaatcaatacttaaaacttttatcattgttttaataggttcttcccttaacttaatgctaaatatatataattaaaaaagtctatttatatccttgatttcaatgaatatcaatggttggttatttttgtatttaaaatattaaaatcatataaaatagttattaaatattgttaaaaaaaactagttattcaggaaattgaaagaaaaactaaaggacccattgaatgaaatgtttcccttggttgatgatttgcatgaatcaattcttgtgttgatatatccgtattccactatgtccctcattgttgatgttttgccctagaatgaaatgaagctcctggtggaagctttacattttatgtttgtgttttcaagtatatttaatctactgatacaaataaacttaagaacaaaaggtacgtcccactaattactgcatgcaataattaatgtggaacgcctttgattgtcgacttctcgacaattcttacactataacacttcattcaagtgataggttaccaaaaagtaaatacattttgttggtgtagataataccaattaattttcttaagtcatcattaactatacagtgtcatacttatacaacctctatatccctctcattccgatataattcgtctggaatgttacacaatgcattaatggtaaaacaaaagccatgcatgaagcattggaatccttctcttaatttcttgagaattggtcatagcaaaagaataaaacaagatccaagaataaactatattactagttatgattgtcaaaaaaaatatttttatggtcctaagtcaaagaccacatgtgtccctcaacccactggatcaaagactaatctcattcgtagtacgtgattgttgcttatccaagaaaatttagcatacgataaaaataaaacacgattattctactaaatagatcattttcagtcatgtgaacacaatgagaccttacaccactatgcaaatcctttgggtttgtcaaagattgatatataaatttaaaggaaaggaataattcaaaaatcttaaaagatgctggaacaatgtctctgtctgggtacatgcattctatgacttactggaatcgcatcaaactttaatcgaatgaaggaaacttaagcaagaagccgagagatcacttttcattcactatgctgagtataaannnnnnnnnnnnnnnnnnnnnnnnnnnnnnnnnnnnnnnnnnnnnnnnnnnnnnnnnnnnnnnnnnnnnnnnnnnnnnnnnnnnnnnnnnnnnnnnnnnnnnnnnnnnnnnnnnnnnnnnnnnnnnnnnnnnnnnnnnnnnnnnnnnnnnnnnnnnnnnnnnnnnnnnnnnnnnnnnnnnnnnnnnnnnnnnnnnnnnnnnnnnnnnnnnnnnnnnnnnnnnnnnnnnnnnnnnnnnnnnnnnnnnnnnnnnnnnnnnnnnnnnnnnnnnnnnnnnnnnnnnnnnnnnnnnnnnnnnnnnnnnnnnnnnnnnnnnnnnnnnnnnnnnnnnnnnnnnnnnnnnnnnnnnnnnnnnnnnnnnnnnnnnnnnnnnnnnnnnnnnnnnnnnnnnnnnnnnnnnnnnnnnnnnnnnnnnnnnnnnnnnnnnnnnnnnnnnnnnnnnnnnnnnnnnnnnnnnnnnnnnnnnnnnnnnnnnnnnnnnnnnnnnnnnnnnnnnnnnnnnnaaaaaaaaacctttccattcactaatgaaactcacttgaaggagctacaagatctcggaaattaaagctataattaccacaaaaatccaatacatttttgtctacatcagctaacataatactttatggggtgagcattaaaatccaataaaattgcagagttgacaatgtacagtttcctaagtatgtctatagcaagtgggtaaaactcttcgcttttcaagattttcgccatgtcactttgcttggtcatcttcgaaggagtagaaatcaaaaaggaaaaagaaacaattggcaagactaatttttcatcttgcattagatcttttcggcttcagccatcttcaaggatgtgaatcccagtgtagggatatttctcatatccgccaaaacacaccaaaaagggatccgcaaggtcttattcgcatgggtggaagaaaaaaattccacagaatgtacaattgctgaagctgtataaatgcagagtgaaagccaacagccaacactcttgtaatcagccactctaatccccaccaagttggttactttatacctgaagagaagccttgtcttgaaggaaacccaccgggttgtgtcctataaggtttctcactagcaaagcgtttgtccgatggcccagcacctaggatcccgagtgagttaggatcagtaatccggactccattacttatggtcctttgaggtggtggctgaccctggaaatgattgtcactttcagttcttcttcttcgtttccatgcctcggatttcccagtattatcaactggttctggcatttgataggtagccatattttttaatcctctttgcctctccatatggcgatggaatggatttccatttctgctaaatgaaacagataatgacccattggcgtgagaggggccaacccctgcctcatcttgctcctgtctaagtttggaatatatttgatgaagcctctcccctgaaagatgggaaaaggtggacacatatttccacagtcgcacagtcattcctgtaaataagcaaaaacaaaaaacaaaaaaaaaaaatcaacacgtggtagagaatcctaaaaaccgttaatcaacaactatcttaacctatcctcttgagaggcaataggagaccaacagcaaaaacaaaaggatatcatacaaaaacaaaacagaaacctttccaagaggaatgaaaacttactatcttgcttatagggttcctgttcatgttctagcacaatttgatctatccttctcccaagaagttgtaaatagttgcgtatttttgaaagcacctaaagtagggaggcagtaaacagtgagacaataaataaaaaaaggacgtactacaaggaaataagccaaaagacataccttttcctttggaagattggcactagtttgctgcaacctgtgaagacgtttcaaagttttcatttcttcaaccatcacatcttgacaccattccatccattttacctccttaaactgctcatatacttcctcattgtcagacatttcaccctcttcctttactatagattcaaccttctggggtttctgaaatctatcctttctcatttggacattaacagaactcgattttttctttttctcctgcccacgtaacagtgagatattaatcatattttctctctctttcttggaaggcttccgtccaactctgctgttggcatttttcacaccaagaactgcaagttcctatacaacaagaaaatcaagacatcatggtaagtgacaaacaatgaagatagattcaacaaagagcgtagcatctatcaacaaataaaggtacacaggaagaattaaaaaagcttagtaggaaagtagatcataaattggtgggtgggggatgttaacatgcacatgaaaagattggggtattgcttcaaatcatctttaatcaatggaatacacaaaacgagtgataaaaaaatgccagcattcacatccctttggtacactaaaatatcaacaaattggtaaaacatacgtcttggaacatgtcacagaagtggatactatgaatgcaagtcaaataaaattcagggctatgcaggacaatcattagcgtggaaactaaagtccactaatttacaaaattgaaacgaaaacaaacaagcgtgcatgtaaatcatatagccaagatgatagaatacacagccagaaatctcctatttacgcaagtattataatattcttgattctgaatctgatatcagtctgagattaaacactcatatacattcactcaacaaaattcccttctcccacaactttttgccaactctattctgactaatagcatgcatattaccctcaattcacattatgaccaccgtactatcatgtgtagcttctccacctcttattctcttctttctagtaaataccctagtgattgagatataatacatgtgaaacattaaataccaaacaatgacatgaagggtaattaacaaagaagaataggaagcatgtaaaagcattagaaacaaagaaagagcaaagaacaagcaaaaaaagaaattaaagaccccttggcagattcataaattgtaaatacagaagaaaaagaaaaaaaaaaaaaaaaaaaacataatgctgaaataagaatttagttaattgcatacttgctccaaaagggcattagcacggtctttcaaatttggagctcgtggcaagaaagtttcatggtgttgaagttctacaggtgcaattttttttgtaaggccaagtctttcatctaatctaatcttttcccaattaccaaacccatggtaatgtattccaagaagcaatctagcatcatcaactgaaaacaggcaaaatacaattagcaaagcagcaataaagtcaacagaataatatcacaaattatataagaggatacacctactttgattccatccacaacctttggaccagtttgatggtttgagatatgacagaacacgaaattgtgcaataggatcttcatatcgaccaatgcgttttgccaaaagttgaagttgttggacacgggtaagtagatcatttgccttcactggtacaccaaaaaaatccagcaaaggcccctggatgcaatattattagatgttataagcttctaaaaaaataagaatacaaataaccatttcaaaccctatctattatagggaacttatcgttataccaacctttgcatctagatttccaagttctattgcttctgtacagccatcaataagagcattgaaaagttcaatctgtgctccaggtggagctgccccaacagcaccaccaacctcggcaacaattaagtcaacttggctctcattgccatatttcataacctggcaaattaattggggatgaacataaaataggaaaaattatttactgctaaagaaaataacaaaatgaagcattttacaagacatacatgcacaaacagcaaacacaaaatgataacgcacaataaaagaaaagcccaaagaacaataaaaagaaaaggttattcattaactcaagggaggtgtaaatgcaacgtcaacacacccacttgctatgacccacagggcagtaccacaattaactctatcctaaaaaggagcaaggaagagatcttagatgctgacaaggaatagatcactccctacttaaacagaaattaaagaacaagtacaacgtcaacacccacttgctatgacccacagggcagtaccacaattaactctatcctaaaaaaggagcaaggaagaaatcttagatgctgacaaggagtagatcactccctacttaaacagaaattaaagaacaagtacatgtcaccataaaaagcatgtcatttctgtaacaaaaacagcaaaattcaagaaagcaaacactttccagtcaccatgaactccattttgtgctggctttaattcatagtcaagcttagcctaagactatcatgcatgcacaaaagtccatatgatttaattcttgaagaaaagaatcaacatcaacatcaacatcaacagcacctttaacccaagttaattggggtcggtggtagatgaacccaatgatagaataccaaatattaattgcttccaagtaatgtatatggaaacataaattatagttttatattcaatatattagtaaagaaacaaactctagaatcggatcggttagaaattcagtgccacctcaagctcatagcaccattaatccatgcataagccaaaaatttagcctatccaaccggctaagtaaaatatgaagaaataactattcagttctattctgctcaactacaattttatggtcctatctcagatttctaatctttacaatacaaacttctacgttctaaagtttaaatgcagatcctacagcacctagttagctaactttttcagaatggaagagagaaaatagcatcagaatagtgggatgaagatcatcaacaatatattaatttaggaaatgcttctgtctccaatataggaagataacaaaagcaatagattttgtttatagtgagacaacactgaaaattgtgagaagtattagaatcttactgaacgagaaaaacgaagtgcgtctcttttagataaattcccatatgaccaatttctcacttggacagatgctccctcaatcattggtactgcaggagcggaatactctgctttccggcgtttcgaaactcgttcagttggttcaggttccttcttttttcttttattacttctttcagatggatcaacctctgcataacttttaatatttctagcagatcgaggaacaagagcttcctacaagaaccaataaagatgaggcacataaaagaaaatcaatttaagcattaactgaaacaaacattacacaaaattattagaaactcaacaacatttgagaattttttaataatatatctataaaagaacaggatcaaacctctgcttcgaatacagcatcaggctttatccaacggctccagaaacttccatcatcctcatcattgcaaaaattggcaacctgtaaaaagtaaatagaaacaacttagcaattcctcaccatatacaaatctatctcttcccaaaccagagaaataaagatgatatcaacaaaaaaatcaattttaaaacagaaacaacaaaattcacagcactgtccaaatatcttgccttaaaagcacccaataattcatttccttgttccccgtcagcttccttctcttcaactttctctgctctttcaagaatctcatctatatccatacttaagagtcgtttcttgctttcttcatcatttctttcttccttaaaaagctcctctgctccaaatcgtaagattgcagacagctcattctgtcatttcagaaacaaatgattggtgcagtaatcgtgtaattaaatatatatannnnnnnnnnnnnnnnnnnnnnnnnnnnnnnnnnnnnnnnnnnnnnnnnnnnnnnnnnnnnnnnnnnnnnnnnnnnnnnnnnnnnnnnnnnnnnnnnnnnnnnnnnnnnnnnnnnnnnnnnnnnnnnnnnnnnnnnnnnnnnnnnnnnnnnnnnnnnnnnnnnnnnnnnnnnnnnnnnnnnnnnnnnnnnnnnnnnnnnnnnnnnnnnnnnnnnnnnnnnnnnnnnnnnnnnnnnnnnnnnnnnnnnnnnnnnnnnnnnnnnnnnnnnnnnnnnnnnnnnnnnnnnnnnnnnnnnnnnnnnnnnnnnnnnnnnnnnnnnnnnnaaaaacaagtctgcataaactaaaacaattcaatgcagtccataaatgatgaaagcaaggtaataaatattcacatgaaattacagttttcacaaatgtccttactttgtcaaaacaacttcccccttttttggcttctttcttttccagtctaccctctgcatttagtttttgaatcaccaagtggtccagaacctatggaacacattcacatgaaaaatgacataaaattgttgacctcaaggattggcaataagcaattgaatgtcttttaggaaaaaatatacattaaacataaaaatataggatgccaaagttggagaaaaagagatgaaacaaaaacagccagcggatatctaatgatttttaacataccattttcttcttagcacgttccagaatatcttcctcaacacttttgcttgtaacaaatctatatatgttaacaacttcttgttgtccaattctatgagctctactcattgcctaaaaaacataaaagtaacagtaagcaccaactatttcattgattaataataaaattacatcagctaaatacctgcaggtcattttgaggattccaatcagaatcaaatattataacagtgtctgctgtggcaaggttgatacccagacctcctgcccgtgttgacagaaggaagcaaaaatcatcactaccaggtgcattgaaatgatccatagcttgttgtcgaagctcagcttttgtactgccatcaagcctctgaaattgaaaccctcgaagtgacatatactcacccagtatatctaacatcctaaccatctgcaatacaactctgttaagttagaatcatcatacactaatccttaaagcacatttcttttgtttcaaaaattaaagcagactaggatgcttagacaagcaacatcaaaagttagaagttatttatgattttcacatccacctgttcatgaattatgcacaagaagtaagtcctaaatcaatagtgaaagatttaagacttcagagagaccagcaatcatatttgttcaccagcaatcagtaatagatcgatcagtatttttgtcagcggtaggtttatcctaatcaattaaatgaatttatggtttcagttcatagattattcaaaggatttgaggtcttgaagaacaatgttgatcaaactatttccctatttttttagatctgtaatagatcaatcagtattttcgtcagcagtaggtttatcctaatcaattaaatgaatttttggtttcagttcataaatgttgagcattaggacttgaagagcaatgttcacataaaaagctaaacagtcaggtaagagataagaaaattcctcgaccatcaccctttaacacatgcacatacacaatgttcagcatattggggttggggggacttaaaacaattagacaccaaaattgattcactacaacacttgtactgtaacatattttaaggaatggttcacacgtcaataactggagagttattgtcattgacagctgataaaaaaaattcaatctaatttccttccctagttctattcggtcaattagaagcgtaagaacaacttattctttcaattacccctggtaaagtagataacaataccagctaaatgagcatgcttaataacaccgagacaaaaagcagaaatatatagtttaatatgatatatgtcattgaaatacatcccacaccactaagtttaagtgaataatggcacataaaaatgtgatcacacaaacattccagtagatcatctttaaaacaactaaaagaaaattttatatttattgcaactgaacaaaaagtacacttcatagttgagctaaactaaagaaaaagtatgatgaaacatcgtggagctaaaagcttccaattatatcaagaagcacatccagtaaaccagttttaattttcaacaacaaacctgagagaaaatcaaaacacgatgcttggtttcatgcaatctaacaagcagcttatcaagtatgacaagcttgccactgctaaaaacaattctctctagtttactgttgtcactacttcttgagtccccaccatagccatggtcagcactttcaaacaagaagggatggttgcagcacttctttaattccaccacaatatttaaaagagaaacctgaaatttagcagaaaaagatttgtgatgatctttcaagagaaaagaatatagaaatatacattatgaattaaaacttctccgaattgtcagtccagatgataataaacagatgcaacatttcattttaatatcttctcccttttttttaattcattttgggtattttttattttcataatatcttctccctttaattgaatattaccaacaaaagaaattaaaaaaatgtacctcagctccttgacatgcacataaatttaccttatactgtaatttttttccacttaaataaaaaagggaaaaaaacataaaggctccttaaacttttctccttttacaaacagacaccctaaactttatgtctcaattcagtcaattaatccttaaactttatctcttctgcaaataggcaccatgaactatatttttgtttcaatcaatccttaaagtttacgtcttttgcacataaatacctaaatttcaatttcatctcaattaattcttaaaaaattatccctttcattaataatcttgtgttaaaataaatttaaattaaattaccaacaaaaaagaaatttctaaacttttccaaacattaaaacataataaaatttaggatcaaaaaataaaatggaaattttaaaattaattttattattacccttttatatatatatatannnnnnnnnnnnnnnnnnnnnnnnnnnnnnnnnnnnnnnnnnnnnnnnnnnnnnnnnnnnnnnnnnnnnnnnnnnnnnnnnnnnnnnnnnnnnnnnnnnnnnnnnnnnnnnnnnnnnnnnnnnnnnnnnnnnnnnnnnnnnnnnnnnnnnnnnnnnnnnnnnnnnnnnnnnnnnnnnnnnnnnnnnnnnnnnnnnnnnnnnnnnnnnnnnnnnnnnnnnnnnnnnnnnnnnnnnnnnnnnnnnnnnnnnnnnnnnnnnnnnnnnnnnnnnnnnnnnnnnnnnnnnnnnnnnnnnnnnnnnnnnnnnnnnnnnnnnnnnnnnnnnnnnnnnnnnnnnnnnnnnnnnnnnnnnnnnnnnnnnnnnnnnnnnnnnnnnnnnnnnnnnnnnnnnnnnnnnnnnnnnnnnnnnnnnnnnnnnnnnnnnnnnnnacatttaagataaataacttgaaaaaaaatatttgtaaaacggataaattttaaagatcaattgaaatgcaattaaagttcaaggtgtctatttacaaaaagattaaagtttacatatcaatcataataaatttaaagtttctggtgtctattcgcaaaattgagacaaaattaaattttagggtgtctatttgcaaaagaagtaaagtgtaacggagtttaatgttattttcccaataaaaataagaaatcttaaaaataataaactgcactaactctagcttgctactgttgacaatcaatgaagtttgcatggtggaaagaaaccacccatcaaagccaagtattggcatttcctatttaattaaccatcatcatgaagaaagcacatgattcatgtacgttatgaacaaacgattgttagaaacacaggaaagggatgtaacctgattcccacgaactcctttgttcaaattgtgaaaattacgttccaaaatccacttataatacctacacgaaggaatacatcaacaggaatttagaaagtgaacttacaataatagtatttttccaaaagaaaaaactttcagaactaaaattgcacttactgtttctgaagaggcgacatttcaaccctaaggatacgctcaattttggggggtaatgatttctccacatctttgataactcttcgaagtatgtgaggtctcaattccatatgcagatttgcaagctaacaaaataatttatgcacatcaaattacagtgaggcagaagtcgagaaactcgagatcaaggaaaatcaagaagcagagaaaaaaagtaaagggtatccatgacaacttatacctcattctcattaaaagaactcagattcttatagttttgaacaaattcatccttgctcctgaacttgtccggatcaaggaaatgaagcaaagccctacaaaacagggagggagaggggaggggaattgtcaaacaaacaagaaaaccaaagcaaacaaaataacagacaacacacataatagaaatcaatttagtggacatataataagaaacaatcaatcaagggagtctcccaaaaactactaaactctgtatttgtgagcttgcataaatatacatgctatttatacaataatgaaaagtaggggtgcaagcggaacggacccaatccgcgaacccgcctagtctgacccaaccagtttagaattttgtggttggattgggtcattgaattggattggttttatttttatgaacccaattgtaattggattgggtgacaggtttaaaattttggacccaataaaaacccaacccaaccagcatatactaaaacaaacataacaaaatactaattatatattataaattaaacttaatagtaaattactaatatagaaattagaaaactctaaagctaagtcactcagtcttgcaagccgcaatagcgtttctccctaaaaccctcgccgtcatcaccatagttgtaaaaccataattgaacatggcatggagcaaatgaacaaaggaatggagttggttgacttatcttttgtaaaacaatgttatatttaaggtttatctttttctatttatcaggagttgtacaatgttttatgaacacagttttttaaaattatcccttactttttttttagtttaaggattttcttatttttttttaagacaaagatgtggttattttttaatgacccaacctgataaccaatccaatccaattaaagttggataggattgggttgtaaaaaagaaggtaatcccaacccaatccaattaagcttaattggattgagttgaaaaacacacaaaattcaacctaatctgtgggccacttacacccctaatgaaaaggcaaaaaactagaagcccccttgcggggtaagactggaggatgccatgatgtaagctgctttaaatggttaatgtaaatgtaaatgtaaatgatatacaaataactcatcatttactaggtcacacatcaagcagttaataatatcattatattcagtaatagcatttattaacatttatccatacaacaatattaagaaatccaacaaatccacaaaagatgtaagtttacttttttgacaattcaaatacgaaaggaaaatgttaatgataccatagttcttccacactgttctgtagaggagtaccagtgataagcaacttgttcttggtgctaaattcctaaaagattagcacaaaacaagccataaaatattaaattctatcataaacaattgcacagaaataaattaagagaaatgttacatactgaaagtgtcgtgtacaactgtgcctcactattttttagcctatgagcctcatccaccatcagataattccatttgatcttagagagaacagccttatccttcaaaactacttcatatgtagtcaacagtgcattgaattttattggcttcccagtttttttctcattataaaattcatattgttgacaaacctgccacaaaatgaaaaacaaaaaatcatatgtaaaagaaataaataaaataaaaagcttgcagaatttaggcttaattatattttttggtccctcaaaatcaaagttggggtctgtcttttttagtccctcaaatttgcaaaatgctttttctagtcccctcctgactgatttttgacagtttatcgcaagagggactaaaaaacatttcgcatatttgggggactaaaaaagatagacccaaaaatttgatggactaaaaacatatttaagtctaggctttttaaaaacataacttaaattcaaagaaaaatatcaaaaccacatccacttactccactgagtatagcttaaatttcttttcatgtagcaagaaataaccaagcaaatcaaagagaagtatacatccatagcaatatagggaaaaggtgattaaatgctagaaagacaaaatttgaagcatggaagacttgacaaaattcataaatcataacttaaagacaaactcagaaatgtctcacctctcgacttgcacgagtaccaacatatatgataatattcatatcaggaagccacttcctgaattctttggcccaatttgataaagtggacaatggaacaactacaagaaaaggaccatggatttgctgggcattctgtgcaaggaacaaaaacgcacgtattattacattgcaagggcaagtgtaatcaaatagagaattgatactacacctgcagaaaaccaagcatcgatactgactgaacagttttcccgaggcccatttcatcggctaaaatgacatttgtatcgtttctccaactgcaaaatgcaatacacagatttagaacaccaaaaaattaaaacgtaccttgacaaatatacaagcatgcatacctgttaacgagaaaattcagaccctcaagttgataatcacggagctttccacccttcaaccattcaggttgttcctcaagcttccgcaaacttgctaaacatcaaaaccaaagattaaaatcagaacttacatagataatatcatgatattctgtacatgaaataatgaaccaaaatattctttatatggtattaaaattaaccaaagaaccaataaaaggaaataggcttcagaaggcaggaactacaaataaaaggaaactatcaaataattctcaatcacccctctccaaatcaactttctcaaatttaagcttaagtaatgattaaatgcaattttagattgaacagatcaaagttaattgttaataatctgatatattaaaaaataagacacgtcatctttgcccagaaacagaaaaaatgaaaaataaaagttacatcctctaaaaaaatctaatacaatgttaaattacatattaagaacatgtagaataaaatggtgacacataaatgaccaaaaaaatttacacctatatctataaggttttctcaactacaaagtttatctttaacgtaatcaattaaaaattgtagttttgcatattaaaaattattttaataatctactaagtagaaaaggagtaatacagtatacaatttcctcaataaagcaattttaaaagtgtcctaaaagatttcacaatataaaactagtaaaaagtcacacctagagtccaatggctttccaaagaaataccaaattcataccaaaaataaaagttcaatcatgtcccagcctgctcctatatttaatagagcagacatgccatgaaaaaaatgaccctaatttgatatataatcaagtaaatcaagactgagaagtccctcgtgatatgaacataaccgaagtggatttctggtacactaaacaaattatagtgatacaacataattggtaaaggtgtacgaaatactgttggtctttttgtttagtaatttaattccaagaacttagaaactatattgttgtagataaaaatgataataacacaagtttaccacaccagcgaccatgtcaagtgcatacacagaatctgtcgaaatgttccgaattttattgaaaaaagagcactgcccacaaacaagtcgaggagtctaccaacctttgctcttcttacgctgagaatctaccatctttccttgaactgccatagcagcctcacgagcctgttcaaatatggcagaacaaaaagttcattgtaagataaataggtaatatccaaattatcatatataaatcttattaacatgtatgcattgcaataaatacaacaaccaggcctagtctattcctagtgggttcagatgtgaaactcccaaaactaccctaggagataaccattcttagcactgctctcaaccaagcatgcacagcaccagaagtttaattcaattgaaggcagaaatacaggagatggataataacttccataagaagaatgactacaaccacataaggaacttttcaaaaccaatacaataatgagaatagagtgaaatagagacttaccttatactcatcaatagcatgttgagcaaaagcaatatcaatgtccttttccctagtacatcaagagtgacaaattacatagaatcaataaaacagaatagatgccttataacagagaaaactaacatcatagtatcatacttgctaaataaagatctaaaagtttaaaacttggagtacaacaatgcttagagatcaatccatcctcctctctaacatgaagacactcgattcacagaaaatgaaacaaaaaatataagtaaatcataactaaatttttagcgtagtgtaccaagtcgcttcagcataagatagtccttgccacttgaccaagtattctggaataacattgccagaattatctttgctgatcctatctgcaattattctttccacctgaaaatgcaaataaacaatccaattagcaaatagcaatacatcagagaaaacaagaccaaagtaatgaaaatattggaatgcaggaaagcaaacctgactgttctgtttgataatatctagatccatctccttactaacgtcattaacctcaatctgcatacaggaacacccaaacaagaaatttttaaaaaaacataaataatatcaatgttcttttccggataaactatttccaccaaataaatttccacaaaaacttctgcagtatttatagcctccagacctattaaataaactggagcatctaaattgattggctgaactcaaataattacctcctctcttgagattgtcctcctgtacctgatgtcttccattattttctttgtataattcaaaaccttcttaaaaccactgagctgcaatctcacataaagacagaatgtattaaattttggccaaaaaaaaaaaaactcaacatgtgaaagagtaaaacaaccaaacaataagaagcaggattgttataataaaaaacagagactgaccgaaagacagtaacaacagaataacaatgattaatgcataataaacaataagaataaatatcatacgttttgcagctcagcaaaagatttccactgacagtgcaaatgtgactgccctttccattttatcaaaaattcgatctcattccaatcaatttccgaatcaaacaagtgactcattaaaacaggctctgttgatctattattcctttgagcatcttcagccatgccctttggctgatgccagagcaccttttcaatggagtcaccatcgtcctcttccatttcttcctgaagagcacttaaaagaatcacatcagtagaaataaatttaaagtatatattaagtaaataggaggtatcataatagcataactaacatctcatactcccaccagaaagccattccaatataaaaagcttaatagcctaataaaatcatcattgctagattaaagtacactgatccttttgatagatataataaactagaattaaagaaggcgtctacaaaaaaatgacatatatccactccgtactctaacaaatctattatccttccagagagatagattgggaaatctcaaacatcaaaaccaatgcagctgaaattaccatcttgcatctttagcatcaactccgtcaagcaatcagcaaacctcataactgagatctctccaccaccaccacaccaaaagtaaagaatagaacagctggcacaaattgcaaacataagctaatggtctccaccaagtggccatataccactcaaaacaaaatatccaatttcataagctttcttcaagccagtaatcattctcttttctctcactcaaagacaatatacaaaggataaaaaacatcacctcctttcctatatccttaaaaattctcaattttctgaatgacgatttaaaacaagacttgagtgtatttgttccaattctcctcagtaaaacacccaataaatttaataatcctatctcttacgcacgatagttcatactataaataatgaaaattaaaagaaacaccaaaataatagataactcaacaatcatcagttcatttcaacataattccattttttatttttttcccatcacattgaactgaaacagaggaatagaaaatacattattttcagattttaagtgcattcaaacataccttccacttcctacgaaacattaatctgaactttaattttgctggtaaaaaaaaaatctgaactttaaatcatgcaatctcacatccactcacccccaaaaacagataaaacacacatcttagaagggctgcgcaggtggacataagatactagttacagatataaaaaatattgggacaacttttttgtggtcattcatgtatcctaatttggagccaaccttcacctagtaagataaggctttgttgttgttgatgtatccttatttggaacagttttagcaggttaggtttaaaatggtgatggtgaaaagtaggtgaaaatttctgggcactacacagtttatgcagcccattcatgtacttggttggagctgtacacttgcaactttaggggtgtctctctactctgcagcttaatttcatttaggattgtgcttttggctccactataagctgctcggatccaatgattatttcaatggagtagtgacttccctctcttctttgtaataaataaatctttttttgtcatcaaatatatgtaaaacttatccttgttaaataaaaccacaacttcctaataatatactaccaattttttttaatcaataagaagaaaaaaatgtctaaccagtagtcatttgcgatgcaagtgaaaacatcctttggagggtatgttatcccaagtgacatgatgatttgagtcttatatgtgagaatcaatatttaacatttaattttagtagataaataaaccccaaaagataggaggtagaaaccatgctcagatgtgtataatgaaggttgtaccttttgggactttttctttttcccttcatcagcttcttcactctcttcactttcaacatatgataccttcctaactgtcctactagaagtgcgaacctcactgttgcgcaaagaaaaacctgtggctgaagatgatcgaccattgttcttgcggacatgaacactccgcttttttgtgcttttgaaatcctcatcactatcactgtcggaatcctccgttgttgactcgttggcctcaaaagatgatttaacccttctttgtcgacctgatgcagcatacactttgcgatctctggtagattttatgttttgtccaatcttacctcgttgccttcctttaggtcttttagcatagaaagattcatcatcatctgagacaactatattttcgtcactgtcatcatcttcatccgagccttcaccttcccaatctttatcctgcaaaataacaacagttaaaccatttgatattattaggaaacatccaccaaaaaaccaagacatattaacttcaaaagtcaaaactagcagtaaagcaaaatttgtcctctaatgaacatatacaagcccttactagataaaagaccattaatgaaatagaattcagcaacaacaataaccacaaataaatgaccttgtttccagcatgaacacttgtggcgggctcaaagtctgcatcgtcaggatcatcttctgcatgatgttaacattaaaaaatcacagttgttcttcactaatcagaactatgtaataaaggccaaacattagctattttaaaagcagtactccatacttaagaaacaatctttatataaataaaatgctcgacataccatctgcttcgtcctcttcttcataatcagcatcatcaccatcatcatcatcttcaccatcattatcttcaacatcatctgaaaaccttgaattcctatgcaaagttctatttgcagaggtcgacatccgttgtggccatgaattcgatccagtgggctttttgatcccaccgtaatgcaatgagtcactttgctcttccccatcctgctcataatactcatcagacaacatctcttcagcaggaacatcagagtgacctcttggaccttttcctgcctccttttgtccatcatcatcatcatctgagtctactcttcccactcttccatccaatgaattatcttcagacccatctgcatttctataatctgatccactttttgattcctgcccagattcagaaccattttgagggtccatttgcccacagtccttccaaaatgttgaaccccaccttccgaccatagctgttttgctaccagtagtctgcaagtttgattctttcacagcatccccatcgtcggctgttgcctcagtttgcagtctagtggaaccatctggttcaccatcactctcatactgtgcctccatgttcatatcaaattctttctcactagaagttgcatcagtacaatcattacctactgatctatgaactctattagcattctgtccttggcttttatcttccatgacaccatgtgagactgtatcatttgaaaagttcctaaagaaagccatcctgtaacatatgactaacttactattatctttacttcaatctccacactggatgcaactaatcattaaaaaaaaaagtgacaaaaatccagtgctgcttcagttatcttctgtctccccagtccccaagacctgaaaaacaaagagtgatatacgatcaatagaatcctgaatgatgcccagctcatgccattgatcacacattgatgatataaataacaacatagaatcccgtattacaaccatccagcaagttagaaaagacgtagaggaaaagcatcaaaccaatttacatcttctgcaacacttctacaaatacatacttacaaaaccaccaaacatgcttagctcttagtagacaaattagcaggttcaagtgttcaatcatcagtgactccatagagttgcaattcctttacaaaccacaggttaacaagtgagttaaaattcccatgctatttatttccacacattctctagcagatgtgcaagttgaaatgaaataacaaaaccatgctccaggttcaattcaagcggaacttgtaccaggtatggcaaattcggtttcaacttcaaattctaggttaaaaacagtcctatatgcattatcctaagttcacgaatgaaccacattgatcaaggagtgtaagcactgcttcaaacgactgtcaagtttaacggtcaaaactgaattccgttaacactcgtatttcgccaaaatcgaatttcaacaccgtgcaatgcacaaaaccatcagcatcatatcaaaaacaagttaatctccgaaaagcaacggcaaaaccgaatcgaaagggataaagcaacggatcgagcagcaaactgaacgaagctcgtcactaaaacccttaaggcttggagagcgcgaccttcggaacaaaaaaccgacctaaatccgaaatcggaaccctaattccgaaaccgaatcactaagcaatgagcgaatccatgcgccgatgatgcaagcaagagcgagcgaacgactctcacctttccacgtgcagatagcagaacagagttccggcaatttagttcgaacggaaggaaccgcgacgagtgacggtgcgcaggttaataattgtgagcgctcttcctccgataaggactcgccggaaacggaatcgccggctacgaatatcaaaagtatagaaaagagagagtaaaagggacagaggaatcggttgatgtttcaggaatcgcggtggagcgagattcgaatgaaggagcagcggtggcggagagattcgccgagcgtggcggtggcggtggcagcgggtggtaacttccgatttagagagttaaacgacgacgcgatttggattaaacgacgatgattttcagatgaaagggggaagagagtctttttgtttgccctttttttttttnnnnnnnnnnnnnnnnnnnnnnnnnnnnnnnnnnnnnnnnnnnnnnnnnnnnnnnnnnnnnnnnnnnnnnnnnnnnnnnnnnnnnnnnnnnnnnnnnnnnnnnnnnnnnnnnnnnnnnnnnnnnnnnnnnnnnnnnnnnnnnnnnnnnnnnnnnnnnnnnnnnnnnnnnnnnnnnnnnnnnnnnnnnnnnnnnnnnnnnnnnnnnnnnnnnnnnnnnnnnnnnnnnnnnnnnnnnnnnnnnnnnnnnnnnnnnnnnnnnnnnnnnnnnnnnnnnnnnnnnnnnnnnnnnnnnnnnnnnnnnnnnnnnnnnnnnnnnnnnnnnnnnnnnnnnnnnnnnnnnnnnnnnnnnnnnnnnnnnnnnnnnnnnnnnnnnnnnnnnnnnnnnnnnnnnnnnnnnnnnnnnnnnnnnnnnnnnnnnnnnnnnnnnnnnnnnnnnnnnnnnnnnnnnnnnnnnnnnnnnnnnnnnnnnnnnnnnnnnnnnnnnnnnnnnnnnnnnnnnnnnnnnnnnnnnnnnnnnnnnnnnnnnnnnnnnnnnnnnnnnnnnnnnnnnnnnnnnnnnnnnnnnnnnnnnnnnnnnnnnnnnnnnnnnnnnnnnnnnnnnnnnnnnnnnnnnnnnnnnnnnnnnnnnnnnnnnnnnnnnnnnnnnnnnnnnnnnnnnnnnnnnnnnnnnnnnnnnnnnnnnnnnnnnnnnnnnnnnnnnnnnnnnnnnnnnnnnnnnnnnnnnnnnnnnnnnnnnnnnnnnnnnnnnnnnnnnnnnnnnnnnnnnnnnnnnnnnnnnnnnnnnnnnnnnnnnnnnnnnnnnnnnnnnnnnnnnnnnnnnnnnnnnnnnnnnnnnnnnnnnnnnnnnnnnnnnnnnnnnnnnnnnnnnnnnnnnnnnnnnnnnnnnnnnnnnnnnnnnnnnnnnnnnnnnnnnnnnnnnnnnnnnnnnnnnnnnnnnnnnnnnnnnnnnnnnnnnnnnnnnnnnnnnnnnnnnnnnnnnnnnnnnnnnnnnnnnnnnnnnnnnnnnnnnnnnnnnnnnnnnnnnnnnnnnnnnnnnnnnnnnnnnnnnnnnnnnnnnnnnnnnnnnnnnnnnnnnnnnnnnnnnnnnnnnnnnnnnnnnnnnnnnnnnnnnnnnnnnnnnnnnnnnnnnnnnnnnnnnnnnnnnnnnnnnnnnnnnnnnnnnnnnnnnnnnnnnnnnnnnnnnnnnnnnnnnnnnnnnnnnnnnnnnnnnnnnnnnnnnnnnnnnnnnnnnnnnnnnnnnnnnnnnnnnnnnnnnnnnnnnnnnnnnnnnnnnnnnnnnnnnnnnnnnnnnnnnnnnnnnnnnnnnnnnnnnnatggcaggtgtatttttaaataaatttttgaaataaaatttaaaaatgtttataatggtttaaaatgaattttaaaaaaaaaattgtgtatcccttctaaaatccggttagtatggataaattggatacttaggtatgttatgatttattttgattattttgaatgttatatttttgaaaattggatgttttaattgaagtagtatagttcatcatttgttggattaacaaaaaaaaaaaacagcacacataatttattaatcgtctcctaaattgacatggtaagtgcgtacggttatggaatcactatacatcctcattcgatcaatataaggagttggccattgtttcgctttattggaacagtgtgttaaccaaccgaatgcggttaatgggataaaacattgatcttgtagttgtacctttttaaataacattgttactaaaaatttaataaaccaaatatgaaataattaaatgcttcaattaaaacattcaattttcaaaaatataacattcaaaataatcaaaataaatcataacatacctaaatatccaatttatccatactaaatcttccccgaattttagaagggatacacaatcttttttaaaattcattttaaaccattataaacctttttaaattttatttcaaaaatatatttaaaaatacacctgtcatatgaaccatacggatcggcaaatctatatgaatcatatggattaccttatccgtatggactatatggatcaccttatccgtatgaaccatatggatcaacgaattatatggatttgataatctgtatggtttatacggatcaactgatctatatgaaccatatgaatccgctaatccatatgaaccatatgaataagctgatccgtataaatcatacggattacctaatccatatacaactaagtctaaacaccatagagttaaaagctgttgaaagagatatttttgtcattttaaactttatatagtgtatgaagaaatttatatagtgtaagaagtaacactcaaaacattagaatgcaaatcacccttgaaagggtccaaagcagtcagaaacattacaacaaaaattgactagttattataacttatatatgtttttagtttatctcaataagtttaaagaacgttgaaatattttttaaaattattttagtaaattttataattacaattatggataaattaatatatataataaaaacttactcaacaatttttaattagattgttcaatcaattacacattaaatatatttatgttttcatttaatgttaaaataatattaatattatagtatgtgaaatatattaaataaatttttactttaagatagctaggattttattttgtacaataaacaagataaataaatattttaaatttataaattagcttataatttaaattcataataactaaatattttgaacatataaattatattttaaatttataataaataaattatattataaaaaaggttaattttattcttttttataattattttaaaccattgaaatataatttaaaaataaatatgaaaacatatttccatcaaaggtatttttgtttaaaaaagttggaggttaacttagaaaaatgggccggaatagcaaagcatcaggtcattttgggaggtacaggaagcaaaaatggaaatgcaggaagcaattacccaatacaactctttgttggttcaaggccgtcaagtaactagtaaaataatttttttttcttatggactgtttcctttaaaaggtcatggattgaatttaactcttttaaattataaaattcactttaaagagaaaataaaaaaatattaaatttaattattaaaatcataattaaatagacaagcatgtataattagttatataacaagtaacgagtaattaagtttttacttgtttaaatcttaattattatttttttaatatcataatcataattccttattttatttttcaaagtgtcttgttgttcacttaaaaggataatgtcactacgcacctaagttggcttcggaagtggtaaccactaatcagtgtcacaatttacaagttctcgatattttgataataaaatatttgtcgtcaatttcggatgaaaggaatacaaaacagaaatggtcaatgtaatacatttttaggacatattcggattaatttaaaattttaattaggattaaacttaagtttacagattaagtttataaaaatatcccaaatattatttttttaaaactgaattttcagataaaattttgttcttaaatatattttaaaaaataatcaaacatgatttcaaacacatttttctcttaaacatacatttggatgttttcacccaaaatccaaaatccccttgctttttacttgttattcattccaaccaaacgccatgttctctttcgtggagtaataataattccatcacgtaagataacataactacagcatgtgaaaaaaaaaacacactagctaattatcttattggatttttcttaattatattgtgaaatattattatttatcattaaaaaatatcgatgataaaattaatatcatgtattttaatcatgaatttatgataataaatatttattgttggacttttgatatgagtaatttgtgatgaggttttatctcaaattgggatcttagactatttttcagtagacctcatagtgtcacatatgatatttctttcattttatttttaatggtaaatctcattttgtgatcttagagagagaaaaaaaaggaagaaaatttattcttatttgaacaatgtgcaaatcttaagggatcttctataagaactcatcctccatgttagagatcttttcaacttttttattggaagatctaatgaaaatcagattttgaattgaggtgtcaaaatagatcccaccaaacattggctcttaaaaagatcgattgacgaggtagattgagttgtgaaaattatgattctagcttattttgatcctctttgattttagtgtgttgttaattttattttaagatgaatattctctttatatgcatatttttgttttcaatttcgagttatactttattttttaattattatgtattatattttgctattttataatataaatggcaacctatgtttttattatagtttttaagtgattaaaaaatattttgttatattgttatataaaatttaattttttttattttaaaagatgagtgacccatgaacttgcacgtttggcccacagcctgctaaggacatgggtgatttgattcatgtacctcccaaaaattttaaaatctcaaactatcctcttcatattatacttttacataataggtattttataacaataaaaaataatttctaaaataggtgttttataacattaaaaaatagtttccgcattctgaaataggtgtttcataataataaaaaatagttccaagaataagtgttctataacaataaaaatagttttgtcttctaaaataggtatttcataacagtaaaaacatagcttccgaaatgcctattacataatagtaaaaaataattgttgaaaataaaaaatattttatgtattccaaaaagcctattctgaaataatctatgttctgaaatgaccattctgtaagactactatataacttctagaatcatgtctatagaataatggttgaaaataaaataaaaattacaaaattgttgttccggaagacaaaataccatattccagattacattcttaccttcaatgatgacgtgcaaaggaaggaggagggggaggacattctgcggcgtcatgacttgtgggatggaggttgtgagactgtcgtgaagaaggtgaagtcgtgggagaagaagttatcattgcgggtgaaggagatgtcatcatgggagtaagtttggtattttcaaacaaattggaaagtgcataatacacatatggagtgcataattcaaatgccaagactaggttgagttagaaaaaaaaattggtaacctggcttgacttgatgtaaaaatatattggactaggatgatttggactagctgaaattagcagctttatcaatgcatagtcctcttccaatctaattcgaccataaaattatcgtcacattaaataattttacatttataattgtgataaatcctagttagtgactagttattcctagtcatcatgtatagatttttttttctctctttatggtgatgcatcaagattataaaatggattcaaataaaacaaatcttaagatattttttaatgagaaaaaaagattatgcattgatttacattatcgtccaattacaatttatcatttatgataaatttattaaatttttaaaaattatcttaaaaatcatgcaaacaataacttgtaatgaattacaatataaaactattttatttacaccgctgtttcttaattaaattgtgtgattgttaaaggttttgaaaaatagtccataattgcaatttttactacaatgttaaggtttatgaagtcttcacaattgcaatgcaacagtaattgtagctccattagtcgtatttgtctaaaaaaattcacaacataaaaaatttcgacaaaattacaatcacaatcatgactgtaatttaaaacctttacatgctactgttaaattatgtcacaatatgcaaaatctattttctaaaattttagcataccttaccaaaatcacttgaattatgataaagcagagggaaaaagaaaaatgtactctgatatgacatctcctagttttcattatgcaggtgataaatatttcctagaatattacaagcaagtagtaaacgaaaaccaaggaatctaactccaacccccatgtattgtacagactcctaaggtactatcaacattaattccttttcccctttagcatcattgtccaactatagtaaattttccagtatgcctacaacatatgcaagtctcttgttcccacaactaagtgttaataaagagaaaaagaaaaagaaaacctttaaaactcaaatgacaaactagttaggaaaattgacaactttaccaaccgacaacattaacacatgcaaggcacatgtatagagtcggctttttcttttatttgttctttaacttttcctttggttctttggtagtagatcactgcttttggaatgcgtttggttgctttgcttgtgcaagcatttcaaccacttccctcatagttggtctctccacactttgttcctgaacacatagcatggccacaaagaatatctgctttgcttcatctaagggaatgtgacatagcctctcatctagaatcttcaccactttgtctttgctccaatttgtttgcaacttggtccattgaacaatgtctagaccttcttcaccaaaattccccactggccttctccctgttagtagttctagcagcaccactccaaagctatagacatcacttttctcatcaactttcaatgtgtatgcatattctgtgatatataaatcaaaatcagtacaccataatagttggctttcacattttagctcaaaagttaaagtaactatgcctatgtatgacagtacaataaatgtcattgttgaggaaaaaagagtttgagtataaaatataatgatgatgatggtgatgatgatgatgatgaaaaagactggctacttaatagttttataaacaaacaagggaaaagctttatttataattttcaagttaaccaattaaatttgtaagaagacaagttagtggtgccttgtgcctgtaaattgttcaattttatttttctggggtttggagaaagtaaatattagatctcaatctggtgccttgatgaaagaagcatatgcttttggtggctcttatggatatgttagtcaaaaaaggatggttgtgattggctttggtttgaatacgggtttacggtttcaaggcatgccaaagcacaaacccagccggcggatccatatgtagttgagggtgggctgatgcatcccctcatttcaataaaattactagtatttatcataaaatattatattttacatctcataattttatattttacaccttctaattttatgtatttgaacctccttaccaattcacatgtaagagtaagtaaatacatcatcttattttaataaaatgcaaaaaaaatatcatattttgcaccccataattttatattttgaatcccttaattttatgtatttgaaccttcttaccagttcacatgtaagagtaaataaatgtactatcttattttaataaaatacaaatatttatcttaaaactttatattttgtttcttttatcttcgtgtttgaatccaactatctcatataataatgataattatcaatttttattttttaaataaattgtccccaatgatccagggtcctagatccgccgccgcgtggcagttaaggtgaggaaaagcaaaagattgaataattttccattgtgttagtggagccttcgaccaatctagaaattcacgtacatgcagggataaaataaataaaatatttttgtgctaacaaaaaacagaaaaagtatattaattcttctattcccattgacttttttactatgaatatttgattgttaaatggacctgaaataatcatctctgttgatatcccttgaccttattaacccaacccactgcagttggcctagtagtgaaagttttggataatttgcacaatattctaagttcaaacttaactgttgtcattgtgcataaaaatacaaataaaactcttgaggccttgacctcaatcatttcacttggtcaaccttttttggggagccaagcaacaatgtctcctaaacttggaagttagagtgtatgtaaccaatataaatctactagaagtagttataatattgtagactaactgatttatatatttaaatattaaaattaagtacctggagcaatgtaaccataggaaccagcaatggaagacatgcactctgatgtcccagtatcttgcaagaacttggcaagtccaaaatcagcaacatgagcctcaaattcagagttcaataatatgttgtttgacttcacatctctgtggattatcagaggggaacaatcatggtgcaaatagcgaagcccttttgcagcttctgttgcaattttcagcctagtatcccactttagaaactctcccctcttcccatgcaagacttcacctaagcttccatttggcatgtactcataaacaagcaaattggtctctctatttgaacaaaatgccagcaacctcacaatgtacctgtgcctgattcttcccagtgtccttatttctgctgagaggccattatcatgagaacatcctttgttgattcccaagagcttcttcacagctacttgctctccatttgacattgttccatggtatacaaccccagctccaccccttcctatggcattgctttcctttatgcaccgtatgatgtcttcacttccaaattcaagattctgaaatgttgtgagcttccatgaattggagtgccttctttgctttctgctcttgataaaggccaatgttgcaaatgccaatgaacaagccaacagtgccactgcaaagagaagcttatacttcccaggaactccaggtcttgcactgccactgtcttgtgactccaatactgcatttgaagagtgtttacatggattcagctcatatccacagagccgaggatttcccacaaaggatgtaaagttaaacactgagaattgcccctcctcaggtattgaaccagagaagtcattgtgagaaaaatctgctgaagtcaagcccttcatggccccaagttccttgggaagactttggcttaggtggttccatgagacattgagatagttcattatgtggatttgagaaagctgaactgggatagggcctgatagttggttttggctcaaatctaaataggtgagcaacaaacagttacgtatctcgggaggaatactacctgaaaaattgttgacactcatatccaacttgagtatatttttcagcctccctatatctggagggatttctcctgagaatctatttccatgaagcagcagaatttgcaagttgggaaagtttccaatggaaattggtagagagccggataggcgattgttggatagattcaactgtccaagtttagagggtgcagtgcttgtttgttgtggaagccaaccactgaggtaattgttctgcaattccaaaagggccaactcaggcaagtaaagaaaaccatttggtattgatcctgtcaaatagttctgtcccaaacgaactctttggagtgtgtagcattggccaagatcagcaggcaaagatccaaacagaaaattgttgagcaggatcaaaatcctcagcctcctcccaaggcatagagatttaggcaccaatccagtgagcttgtttgttgacaggtcaagctcggccaatttgctattctggccaagccttgatggaatggcacctgtgaagttgttctgccaaagcttcagcacttccaagttaggcagctcagcaatgaaaggtggaatttcaccatgcaacctgttgatgaacaagttcaagagggtgagctcatgaaggcctgagaactcattagggatgtctcctgtgagctcattgtttgacaaatcaagacacttcaggctactcatgttgcctaattggggagggattgagccactgagctggttagtttgcaagaagagagtgtctagtttgatgaggtttcccaactcagctggaattggacctgtcaagccacagtttgcaaggtcaacttgagttaaactaaccaacttaccaaactcaggagggattccaccatcaaactgattgtagtatcccaagaaaagctgtctcaggttagtgagattcccaagctcaggtggtatgagacccctcaaatcatttcctgcaagagacagaaagttgagctgaaccatgtctccatagcttggagggatttcaccaaagaaatagttcccgccaaaattcaagctattgagcttggggagctgagtgacaccaagagggagggagcaattaaactcattgtcataagcatcaagcacttcaagctctctcaactgagaaaatttccatctcatgtctccactgaacttgttgccggatatgttgaggaatcttagcaattctagcttgtgaatttcactagggaaccctcctgagaagccattaccagcaagtgaaacactcacaaggctccttagtcctgtgatggaaggtgaaagtgtgccagaaatgttgaagttggatatgtccaatgacaccactgacctattcttttggtcacactgaataccctcccaggtactgcaaagggacatgtagttagacatgttccagcttctcaaagaatcagtgttggcctcaaagtcttgtttgagagaaaccaagatagaggcttgccttctcaaagacatgggaagagaagaaacagaagcaggccaagttaagcacaaaaggaggagtacaagtacaaggccaagagttacagttcccatttttgggattaactagcttagaagttaaggatatgcagttggaataataacaacaatatcatagagttatgctgaatatgaagtagcaggtggtgagagagagagagtgtgtgtgaggagtgttatgtgttgtaatgttaagagctcagaggtaacagtgttacagcatccaatgtcctcttctcttttccctctcttcttttctccgcacacaaacatacatacacacactactttggtgtcatctctagcttttaaaaagcaaaagcagtgtttggatagaaaatgcttaaccacggaccgtttcacaacccagttaaattttatttattttttattttttcattttatttgtattctgtcggtttttgagcctagtagcaccacttcctttagctttttctttctttctttgtttttctttttttgtttattcataaaccaattccaccagagcagctgatgaatcagatttggatgatggggatataatcgtagaccatattatagataccaatcatgggggagaataaattgatacaatgtgcatgctgagtgtacctttatttttttattaatttctggattttgaaaaagagaatgtggtgggggtgtcatgaatggaacttaatttttgttttaataaatgagaaattacaacgattaacctctctctctctctctctctctctatatatatatatatatggtcatagaagctaccgtactatatgtcataaatcatctatttcatttcataggcttaaattattgaataaggacacctgaatgatttgtagaaaaaaggcatatctctaagagactaacagaaattgtatttatataatttctctgtgtacaagaatggcgtgataaaatagttgatgtgatgaaaatagataaagaaataacattgcatggatgaatattagatatggctagcgttatgcatagaaggagaaagaaatttctgagcaacatgaatattagatatggctagctttattcagccaattcgaaaaaccattgatgtttcataacatggttcatgcttatatgaaaagagaaaacaattatcagggtatcaattcatgttagtaatcagaacacattaaagaagcacgtgttcactttggcatgtccaaaagtttatttaacgcatcattaatttaaaatcaaggaatcataaagaaaaaagttgttttcatgtttgttatgctcaatcagaagatgaagttaggaatcatcttttaaaatcgatcgaggtccttctccgcaannnnnnnnnnnnnnnnnnnnnnnnnnnnnnnnnnnnnnnnnnnnnnnnnnnnnnnnnnnnnnnnnnnnnnnnnnnnnnnnnnnnnnnnnnnnnnnnnnnnnnnnnnnnnnnnnnnnnnnnnnnnnnnnnnnnnnnnnnnnnnnnnnnnnnnnnnnnnnnnnnnnnnnnnnnnnnnnnnnnnnnnnnnnnnnnnnnnnnnnnnnnnnnnnnnnnnnnnnnnnnnnnnnnnnnnnnnnnnnnnnnnnnnnnnnnnnnnnnnnnnnnnnnnnnnnnnnnnnnnnnnnnnnnnnnnnnnnnnnnnnnnnnnnnnnnnnnnnnnnnnnnnnnnnnnnnnnnnnnnnnnnnnnnnnnnnnnnnnnnnnnnnnnnnnnnnnnnnnnnnnnnnnnnnnnnnnnnnnnnnnnnnnnnnnnnnnnnnnnnnnnnnnnnnnnnnnnnnnnnnnnnnnnnnnnnnnnnnnnnnnnnnnnnnnnnnnnnnnnnnnnnnnnnnnnnnnnnnnnnnnnnnnnnnnnnnnnnnnaagacagagatgaaaaaggaaaagggaatgaaatttaaagtatatgatatggttgatccagccacatcaaaatgtaattttaaagaacttggcaccatcaggatcaggccatcaacataccaatcaatacatgttagatcccaattgctgaactgagaaagtaaatctcagaaacatatgttcaattttctctttctggggttttgagaaagtaaatcttagttcccacttcccaatcctagtcagcccctccccaaaaaaatgaaaatgaaaataggaaaaaaaattgatgtatatgaattgagtggcagccaactcagaccagttatagatgtaatgaacgagacaatcttcatgatttaataatgaggacatgaggatgcaagaaagcaacctaggtcagctcataaactccaacagtttaatttctttttaggtggataccattggtcccctggacccctttctttctttgtatttagtttcccccagtaagaataaagtacattgctatatatcgtataataataataaaaaatataaatattttttacattatcatctgctcatgaacatgatctgataaatttattaatttttataataattatttttaaaatcatattaaaaataatttttaattaattaacaatatattttttttttctaactagttgttagtacaatgtttattttatatcaaggtcgagatttgaattctaaagcattgaattaagaaacataagttattattatttgtgtcaatcattattgataaaaaaaaaaaaactttacaatgtatgtttgttaaactgtaataatgataataattttaaaaggtacagtgttctacaaggagcctcgcagcctcttttaaccctttcgctttacaccctaacgtgaaaaagaaaaggcaaagccatcgattcttcttttgagaccatgttgggatccatcatattgatctcttcaaaaatgtaaatttctcgctacaaaatgtggaccagtttgaatctttctttttaccataattgtattttgatgaccaattggatggcaggggaagctaatattgggagggtgctatggttgaaattgaaggcataacagttggggcctcatagagtgattggaaaacatgctggtcccatttctgggaattccttgttttgttttggggtagtggagttaggacccatttctagcattaagccactaaaaacaagtactttagtttaggcacactttctgcttcagttgaagatttggaagatggttgtcctaatcttggttccaattgggtaaggttcgtggcatcatataatgtataataaattccaaagtggtctagtctaacctgtgctgctgtgcaatgggataataatacatatgaattattgttatttatatataaggagcaaaaacagcactgggtacgggtctaaattgaaaaatcacatttagaccttcctttcatgcacctcatgtttatctgatctcacccactgagcaaaggggtcgtggcactggccacaacggacgcagaagctaaataatggcagcgatatagatatgcagagaaatcttatttgtcccatctaagattcctagtttacgagccctctgtatatagatggagatttgcgtgtaccagctcagctagtcacgctagataacacgtttaagattttaaattttgaattagggtctgacaaattacatacgatggacacaaggaaaaaagtttatttttttgttatttcctaaactatgggacaatttattgttccaagtacaaaatcttcaacaagcaaaaataatcatttttattcataacttgataattatattttcttttttccactacaatctttagttatcaacttcatcatcgtcatcatcattactatcatatttatcattattattgacattattttcaatatcgttattgttactattatttataacattatcattgtcgtcaccacccctataattgttatcgtcaccattcctatcactaccaattttattattgttgttgttaccattaccctctttagaatcatcataattggtgtcaccattacgtcatcatcgttatcataattaaaaatgtgacaacttggtggctaaatatgtgaaataggagaaattatgagtaaattataaattgtacttactgaaaaaacaaatgttaaatgctctaaaaaatcaagtttgaaagtagaaagaaaaaaaaagttaagagaaaaaaaatgagaacaataattgaatttggcaagcatggaattgcactaaaaaattgtaacactagaaatgctgcttgtgatattgtccaatgcataaactttatggggtattgagatgacataagagtcctttatttttccttttctttgattttcttaccttgtcattgtaacctctaactcaattacatctctttaaagaccttgtgatttgcttgtgtttatttggttactagtggagatgaggttccgtacccaacctatagtaggacactttgcattgagaagttgagtaaaacggattttatcctaaaacaccttagtgaagtgagatgagtgaacttgtctttgcaatcattagttttggaggatgagcctctaattggactttatttgattatttgcataataatggttatctgttgctttttcttatacttgagttatgatatgatgaatctttttattaaaaacttttgctcatgataattgcttgaggacaaacaaatctctaagtttggggttgtttgatgtgttacatttagtcttttaagtgggaagcattttagttaggattatttgcattattggttgtttaggtctatattttttgttcattgcattgcattttattcttttgtcaaacttgttatgtcgtgggtgttttcacgttacaaaagccatgttgactagaccttcaatgctaaatgaagcttttctagtgcatgttggatttccaggattaaacttgatcatcaggaacatgggctacaaagtattgatcgagaagagaaaagccaaggaaaaatcaaaagctcatttaagtcgttaatctctaagtcaaaacccttctacaaagtttttctaagttatttaaagacacaaactaaaatttgttcataccaaaatacactaaaacgcacaaaaataagaaaataagtcgtcaactaaaggacacgctcgtgccaaatttgtcaacaacctgatcaagaaataaggggcttagcacgcccgtgccactaaatgacacgttcgtgctagatgcataaaagcttgattgcgacataatggacttggcacactggtgccagatggagccattcacaaatagctctattttccttccaaaaaggtccttgatgacaagtttgatcctaaaagtccaacatgcactagaaaatatccatttagcaccaaaggccaagccaacatggctcctgtacacatgaaaacacccacgacgtaacaagttcaacaaaaagaataaaatgcaatgcaataaacaaaaaaccaagacctaaacaaccaatgatgcaagtaatcctaactaaaatgcttcataattaaagactaaatgcaacgcatcacaccaccattgttgttattgccaacatcatttgtcgtcattgttaccccaattgccattactatcacaatcaccatgaagataattaatatttatttgatcggtattaagatgaatagataataaatatgaattgtattaagataattaatgttaaaaagggtaatatagtaaatttcacattattttgactatgtaatccaatatccacaaacaatgcaaaaggaaaaaacttgtcatataacttatgtgtttgttttgtattgttctccttatgctattctttggtatgtatcaaaacaaatccttacgccttgtttcgtagagaggaaaaaaaatgaatgaattgaaatacgtgagaagtaaaataaaaattaaaggtattggttgaagataatagaaaataaatgaagagaaaccaacttttttataaatgtttccatcctaatcatatctaccaaacaaaccaacttattttcatctcttcctatcctctctaatttttctctatcaaataaagtcataatgtgatttacatactttaaaacacgaatacatataattacacaaaatgttacatgtttcatagacaattttaactagtttagtaatttataacttatttggcaagattataagtttatttgactaaagtaaacaagcttatctatgacgaagatagtttcattctaacttaacaagaatttggatatcatgatgaacccaatacttatttttcatgatgtatttatggaccagagtttaattagtttggttaaatagttctgggttgaatatgatcataagcatttttttcttaaactccatactattttacccaattgctttagtgaaaaaatgttatgtattgacagtgtaaatttttttatacagtcatccaatcacaatctatcgtatatgataagtttgttgacttttacaataattatctaaagtaattcaaacgacaattgatgattggataacagtgcaaaattgatttataccgccattgcataagcattaaactcatttcttaagccttttttaacttgtagtttcatgactaaactttgcaaagctttattaattattggcttaaatatgtttttggtgcttgtaagttgacatttttttaattttagttttttaagttgatttcttttcaattttatttcttgtaagtttttctttgtttgattttagttcttataatataaagtttttcaattttagtcattttaaccttcatattctagtgttttcatttatagtctccataaattcatacttatagagtccaaaatttttaaaaatgtaaacttacatgaattaaaaataagtaaaatatcttatagagaccaaaattttaaaaacacaaatttttagagattaaaattataaaggtaaacttagatgaataaaaaataaaaaatgctaaaccaaagatatatttaaaccttaattcttactttagccgatgattgaaaaaaaatagtttaacctggatagatttttatgagtaaattacttattaaaagctctcatatattgtctcctacaatataatattgttttattaaaaaaattaacattatactgttcattttaattattccattatttacataatttacttatattttaataaaatattttgaaaaaattataagagttcaaaattaattaaaaactaaaatatgattatttaatagtattttttgttaacaatattatttctagaaacaatagaccagaacaagatattttaaatttgtgagactaaaatgaaattttaagatatttttaaaaactaaaaccacatgttactaacttaaaatttgtcatataacttataaattagaagctacataattgtttttcaattttatctatacatttataatcaataactttttatcttatattaatactcgtactttcaataaaatatgattacaagcttaatcatttcactttttaatagtatatttttcttggtaatatataatgatatgaaagaatatgtatacatgctccacaataattaaataagaaagacatacataatgatattaaaatcaaatcctatcgacattctttaaaaaaatatatttatcaactgtgttaaatattgttagatttttttatagactagttttatgtttgaatattttttaaacattcataatttttttaaatcttataaatttataagattcttttaaatcttaaaatttaatgatacaaatcttttaaaattcaaactataaaatcttcatcataattttttttaaagaaaattatataagttattacatttttccaagtcctttaaatttcacaagaattatttatgcttaatttaaaatccgaatctaatacgatctaatgtaaaatgtgtgattagtatttctctaatagtatattttaaaattataattttcacatatttaaaatgggacacattattattatatgtgtgtgtggttttgattttttaaagtgagacaaatatttttgtgaataaaaaacacttataagttattatcgtgcattttctctaagaaattaataatgtcaggggacatgcatgatgatccgaattattttgagtgaatttttgaaaatcaaattagacatttactgttacaacgaaggtcgtgaaacctctaccaatattcatcaagatgaaatatattctagcattttttttagaagattatagtccatctgtttcattgaaatgtgaggatttttatatatatataataataactttattttcactgctgtttagtgggctagatgtgaggcggttccggattattgggtctagtgatggcctttgttatttgcaccctgtatagctaagtccacacactattattgttgatttttttttttttttgaaaatacttttgattaaacatgtttccattgtgtattgtgtatttaggagtgtgtgactcaccacaatattctgtattgcaccatcaattgttgtgaaaacatagtgactggcatgtcatatttctaaatgacataattattggactacaaatattattattatgtcattagttaatattatcatttaactataaagattaaaatcaaaagtattaaattttacatagcctacaataaaataaaaaatttaaataataaatgatcaaaatcaaaataagtatattatttacaaaccaataatcctatttaagcattttttattaaattaaaacatgaaatttgtcttatcagaatcatttataagaaaaatatgaaaaccaactaatgtttgaaccaaaattagatgtaaagaaaatgaaaattacatgaaaaatgagtttcatgaataattaatttttttaaaaaattaatatcatattcttttttgattgctcacgagatttatctttcacatgattttggttctggttgcttttatacaaataagtttaataaaataagtttcacctcttgaataaattgaaaaaaattaaaatagtgctaagaaaatgataaattttgttgaaagaactaacatgtttttaattaaataaataagaaaaattagtactattattattttaaattaggagactaatttaaaaataaataaatcaagagcctcaaattcatctctgaaaaaaatgcaataggcgcaccggagcagtaagaagactcgcacacagaagattgtcccacccgccaaatatctcctccatttccatattctattctcataaaaccctaaaccccgaattgtagtgtttagggtttccgtttccattttctcaccacaccatgttaaccgcaatcctcagaagaacctgttccactctctcaaggcgcggtttccccgccgccttaatctccgcctccacctccaccgccactgtcggaaaccacttccggccaccctccgcggccttcaattccagaaccttccactctaacgctggccccttgaatttccgctcctcttcatgtcatcgcgcagaatacgccgtcgacgatttcccttacgaagaaagctccaaagggaacgccgccgacgaaggcctcgagatcgcgaagctcggaatttctgaggatatagtctccgctttggccaagaaaggcatcaccaagctcttccctattcaggtttgctttgcttcctagggtttactcgtcggtgcataatatgatccatggttgataattaaccctgtgtagtttagactttagatgtttagtaactttgagcttctgttaattttttaattaattaattattttgttaaattgtagagggctgtgttggaacctgctatgcaaggtcgtgatatgattggtcgagctagaactggaactgggaagactcttgcttttgggatacccatcatggataaggtcattcagtttaatgctaagcatgggttagttctatttttttttttttttatgatatcgtcatgcttatgtttcgctattacttgaatttgtaactttttctctgcgtgagttaaaggtggactatgcaattgatattggtgtggatggaatcatggaaaaccttgagttgttttttaactgtacaagtttttttgtggttgatgtggcaggcgggggagggatcctttggctttggttttggctccgaccagagagcttgctcgacaggttgaatcggagttctgtgagtcggcacctaatttggatacaatttgtgtttatgggggtacacccatctctcggcagatgaggcaacttgattatggggttgatattgctgtgggaacacctggtcggattattgaccttctcaacagaggtgctctaaatttgaaggatgttcagtttgttgttcttgatgaagctgatcagatgcttcaggtgggctttcaggaagacgtggagaagatcttggagaggttgcccccaaaacggcagactcttatgttctctgcaacaatgccatcttggataaagcaaatttcacgcaattacctgaataatcccctgaccattgatcttgtgagtatgaaattctattttaggctattggagaatgcctttaagctgttgcaattctgagatatcgtttagttaaccggaatatgactcctctaaaaaaatataatgtagaaacaccacctagtatattaagttgtagggcacatgaacctcattgagaaataagtttataatatctaaatgtacatatggtttgtgcatgtgtgcgcaagtgagcacatgatagttacgttttaattggaaacttattggtgctgtaggttggagattctgatcagaagttggcagatggaatttcactgtactccattgcaaccgatttgtatgttaaagcgggaattctttcacctctaataaccgtatgccttcggaaaccatcatttcttgattgctagttcttctgattaacgatttttactatcatttctgtttcataagaagtaggttttgaaaaaagttgttatttttccatagtttttaggggtgagtcttggcccaatggtagggttggcgccttgactcgaaggtcacaggtacaaattctagaaacagcctttccgcttgaggtggtaaggctgtgtacatctaggctccttagacccaattaggtatagccttgtgcactgggtcacccttttatatatttttaagggtttactatctttttagttcctaaactttataggatttctgtttttaatccctgaacatttttttactgcttttagtccctcaatttttttttccgttccgacttttagtaaaaataaggatggaaaaatgttaagtgactaaaagtaaggacagaaaaaagtcaatggacgttgatcagtagaaaaaaaattcaggactaaaaacaaaaatcctaaaaagtttagggactaaaatgatagtaaaccctatttttatttagaaaagctagttaaggaaacttcttgctggattttttttttgtctctcctaaagatatatcctttgttaggaacatgcaaaaggaggaaagtgtattgttttcactcaaacaaaacgtgatgctgatcgattatcatataccatggcaagaagtgttaaatgtgaggctttgcatggagacatatcacaaggtcagagggagaaaacacttgctggcttcagaaatggccatttcaatgttttagtggcaactgatgttgcctcacgtgggcttgatatacctaatgttgatcttgtgagttgttttatttctttgaaatagttaagttggctgacccattggaattgtgtttattgttattgaattgcaagaaaactcttatttttccatgggtttttctgctgcttatcagttattattaccgttttcttctcaatatatctgagatattaattacttatgtaaggacaaggtatgcatatgataactcacttgtctctgattgattactttttagaattttctctaatttttagagtgggattctctacatttccgacttgtatttattttcatcagatgttctggccatagctagtatgttgttgaaatcaatgaatagcttctgatatttatgatgctgcatttcctcttaattttttgagcaaatttgctttacaaaacaaatgatgcattttcaaaagatgggctgtacactttctgtgtattgatgatattattaggtatgtttccatatagaacaacatattttagcatctgatcgttcattcttatctgctttcagagctttaaatgttcgttcttactttttagcaatggagcaatactttaggtgtattcttgccaatgttctgtccgtggttctataaatcttggacctcagattttattttgttgcttgatgtgttattgttttgtattttgcggtctttatcaatattctatgctttactttgtttaacatgtcatgtgcatatgcaaatactttcatatagaaaatattgttaccatgttattcaattttttatatgtgaagttttaacttggtttccttctataggtaatacattatgatcttcccaacaattcagagatatttgttcatcgttctggacgaacaggtcgtgctggtaagaaaggaactgctattcttgtgtatacagaagatcaatcgagggctgttaagcttattgagcgtgatgtgggcagtagatttacagaggtgatctcctggcatcctatcaatttctgccctttttactggaagttgtagcttgttaattagtaattttcttgtgattgaaattgaggataatctatttttaattactaacaaggataacacaacctcctgccttaaatcccatccttcctgtgcacaatgagatttaaacctgtgaaatcccaagttaaagcagttgatgttgaacaattagagttcccatgtagagacttgctgaaatagtttagtattagtttgcgagtcaggttggcaggttgcaactaatactggtaaaactttagttactgaaaatcttaattttctttagtactcttgtatatctaagctgccagtgaactactatcctacagttattacttattactactgttttttattttttattttttatactgtgatgtttgctctatgctaattacattataggacagtattatttatttatttataatgattaattgattgctttttattcctatattcgtgtttatcagctaccacggattgctgttgatagtgcatcagtggtgatgggtggtggcatgggtggtgggagatttggttctttcggaggtaccagggatcgtcgatatggtgatacgggttttggatctggccgttctgggggctacagtaaccccggttctggccgctctagctttggaaattccggtgaaaggtttggtggacagaattataatcgttttggttcgggtaattcatctggtgaaatgaatagatatggtggaccaagctctggtcgttttggatcatctggtggctttggttcaggtcaatcaggaagtagatctggcggatcatccagtgggtctaggtttggtcgctcagatgattttgggggatttggtggttcagatcgttcgggtggttttggagattttggctcaggtgagcctagtggctctggtggttctcgtggtagtaatcagaacaatagaagacctttttaacttaattaacataaatataaaaaaatgcaccatccttatttatggtggcttagttcttgtagagtttgcgtctgtcatttcctctaaaacttacaggtttcttggctaatccttgtattactaaggattttagaagacagaagttctacggccattggatttttcttttcttttctgggacttttggctcagtctcaatgtgtatgttctttttgaaacatgtaaaaggagaaaaaagggagggctgtattctgcgggttccatcatctgccatagctcattacttgtctgtatgggcaacatcagcacgggcagttttaaagaggcagctgtatttatatttatgttccttatagtagtagtagttaagggaagatcaaatgtcttggtaacctgtagtgtagggtgctttgctgttttattttatactaaaaatctattatgcaagaagtttctcatctactatgtaattttggttatcaaatatttgtttttcgccccttcaccctgggttacataaggggtttgattaaataatttgggaatcacgttgtttaaatcctgcctttcccggtgttcgtattttgcctaacagttgctagatttcgttgatccacaaggaagtaatgaaatgtttataaaaagaaaaaaacagcaagaggtagctgaaggagcattatgagcattaaccctgcacgtgagagaaaaataggaggaaagaattgtagaaattttatgagtttcattatttgcttgaagattggagggaaagtagaaactattgacttttaaaaattccatctttttttcaaattattgttccagcttaaattttaaaaatctgtttttctttttctttttctttcctgtcatttgaacgaagggtaaatgtaggcgaggaatttcttagtatttgtttgtatgagcgttgtaataaaattaattttgtaaaattgatattgtttaaaattaattttgaaatgatatggtttatgtttgtatactttgttgtaggttaaaagtaaaattcaatacaaaattttgaattcaacactcaaaatttttgatccacaattaattttgaattttctctaacataaaattaaatatatgaaaatacattcaaaattaatttttcaacgtcaaatcaaacacgcacttaatgtagcactaaaaaagtacaaccccgttggatttaaaagatttcaaacttgtgttttggattagaattttttgcattattaaattcatatttttatattttttaatacttttttagaatgataatattgtctgacggaatgatttaatctaaagtaactcatttcatggggtttagtcagagtgctaaaataaattcattcatcactagatgggatgatttaacgtaaagtaacccatctttggattttttttataaaaaagttaatgttttaaaatgctagtatatatttaatacattttaagttgttaaatattattattttctgaataacttgtgttgttatgaggtttagaaatttctaaaattctaatatttcagggcgccttttcttaaaatataatttttgaaaataaagttttcaaaaccaaatgttaaaattaatctgaagataaactttattaaaaataatgaaagtatttttttctattccaatttctctcgcactccattcttttttgttatcccgtacgatctttcacataaatttgatgattgtcaaacaatacttaactgcaggaagtacattctaataaccatttcagtaaacatgacaacattttatatttaagtaatttcttttcaaataaatagaaactagtttaaaacaaattttaactaaagtaaatttagcttaaaattggttataaacaatctcaatttataatttttatgtaattttacatattgttgatgcgtgattttgaattttggatttatgcataaataacataatagatgaatctttaaataaatataggatagactcatgaccctttaaatggatataaaatagattataatatcatcttagaatatgagtttgaatataactcaccttcaaaaattagttcatgaatttaaataacataatagatgattctttaaatggatataggatagactcatatgattatttaaatagannnnnnnnnnnnnnnnnnnnnnnnnnnnnnnnnnnnnnnnnnnnnnnnnnnnnnnnnnnnnnnnnnnnnnnnnnnnnnnnnnnnnnnnnnnnnnnnnnnnnnnnnnnnnnnnnnnnnnnnnnnnnnnnnnnnnnnnnnnnnnnnnnnnnnnnnnnnnnnnnnnnnnnnnnnnnnnnnnnnnnnnnnnnnnnnnnnnnnnnnnnnnnnnnnnnnnnnnnnnnnnnnnnnnnnnnnnnnnnnnnnnnnnnnaaaaaaaaaaaaactagacgaaacacacaaatatatagttaatagtaattcttaaggatactactatactggtgatgcggtcaccaaagtaatctgctctagctctggaatttgtctcgtactaaaaggttggaagataaagaatgtactgaatacaaaaactaatttgtggcaacatcttttatattttgtataaaccattgtaaaactcaaaactataaaaaaaaatgtgctaatcatatagaataattgcatattaaaaaaatcatgttgagaaatatcttgaggtaacagttttatccataaatgccatcacttattattcagcaaagacaaagctaacattttaatacttatctataaggaagtcagaggacgaaaaagaagataaccgccattgacccctttcaaatctaagtaaaattatagggccaacaggggaatgatttagctggtaaggatcaaccaagtaaacctggtgaagcttaggtttagtttttgcagccaccaatactcctttctggagtgacaacacccctacctcctcttttcctaaactctgatgatttaccaaaaaaattatgttttggatttacccggaaaaaatgtacagattatagaactatttatacaagaaatcaattgctccagatcagactctaccagcagtttgaaaaggacaaagtcaaaaaagaaggaccaatcaccaagggatactcaaatcatgctggcactccgccacttcttcatattcttctttcgccgagagcgaggaaacaatagttgccaaatttgtttttcagctgcatttgcattggcggcctgcaaatgggagaaaaaaaatccattaatgaatttgaaaaatgccatactggacatttcttctttaagcaaatttatacctatcgccccatagaaatgcttatgtaggtccaagcctatggagtgaaatagcctacgtgattggctcttgctaaccattagataaaaatgccttaaatgaacagttgtggactgtaaaggcttctttcaagtgtggtcaattacacaaacacaacagtatgttccctcttctgatcacgtgttcatcaccttaccccatcccacaaccaaccaatgacaatacaacacatttgttgcattttatgcagcagtggccctggagatttgtacttgtcccttctctttttcatcttcatcctaactaaaccgttaattgagaagcccacttcctaaatattacaaaaaatacatttttggagaatcccgttcaaattctcttcctgtgtgctacacaagcatgtgatatgtgtgtgacaaattagttgacttagaaccttggacttgtagttttgcttcaaatattattataataaattcatcaaataatactgctctagttacaaaataatgccaataaaatattttttgggctattatataacattggatttattttaacattagcatttaagatgccacatcaaacactggataacataaaaatcataagcttcttacacaatcaagcctcaaattatcccatgagagatttttagaatctagattgttttaataactaatagacatgttctcaccaggatgttcaggtgagggtccatgacagaatcaatctgaaataatgtacactcagttgaaacccacaacgcttacctggactttgaatggaaaccgatgagtttttacttctgcacctgaaagaactctaacatccacgccaaggctgtcaaccccaaccaggtaagctccctggaaaccatgtaataacactgaaataaacaactggctactaacagtagacatacaaaatcaaagtataaaaatataacgaaccaaataatagtcatttcctatgcgtgagtgttttgtttggtgtcatgaagggaaatgaataagatagaaaagaaaaggagaagtaaaggaatcatcactttccttgtcagatatcatccaatggaaaataagggaggctttccttcggttatttggtttcataaaggaaaagaatgaagatgtatgtaaataaatgtcaaattattttattaccctttatatgatgaaattgatttacttgaaagatttgcatggtggttagagtggggaaaaaattggattacctcgccataaagacctttcttcttgcaaagtgctttaatttcatcatcacagaatcgattgaagcgttccagaatttccgaacaagagtgtgcaagaatatcaggttcagcatcttgaaagtctagcacactaatttcagactgcaatttttgtggataggtagaacatgcataatttgtaatttagaataaatctcaacaaacttaaaaatgcttcaaattacagaaaaatatcggagtttggtaacttgctttctaagaatattttagtaagttacaccttttggtgtatttttaaaaaataaaattataacatgtttacacattctttctaaaaacaagtaggtgtcttaaccacatgggtgctaacatacacccacttgtatgctagcaagttgtgtgtgtataaataattctcattttaagaatgtcagagctataaatctaggtcatataaccatacatggattgtcaagattaaaggttatttagtggtcacatgactacttaaaatagtcatctgcattttttatattttttttaaatcttgactattcagatataatttaagaatagatagatgtagggatagaaatctgttttgagatacatgcctgatatccatacatggagtggagctcgattgacaggatctccaatcgatatagtgtcaaattagtgtctctttcatcatcatcatcactatttgagttaaaatcttcaccatccaaagattgaaaaggaaaaaaaagttaaaaggcaatttaccaattaatcaacatttttttttgtcaaagctaagatttcatgttactgaggaagaagaggctctacctcttcaagttacataaatgcattatgctcagagaactacaatgacaagcttcaagctttgttgttatattgatattgcaatattagattagctttcctagacaagaaccaatgagtaaaagtagctgaacccaaacaactagcaccaaagtttgagtgttcaataaagtaccacaactttagtcagctaaacaagatccttctgcaatatcaaactcttaggaagtacagagcactctgtcctctttaacatgcttcttcttcagaaatgcaccatggcaagaaagtatgatatcaaaagcatataaaaggtagcctacaaattaataaattactttacataataaaaacattaaagtaacatataaaagttaaaactggatcggtgcaaatgtgtaattatatcctttactccaacttccaacacaagaaacttaacattccccttcaataaaaatctatgctctacaaaatttaattttaggaatttatacagttatccatagagttgctctgataggtaacctatcatgctcttaattttaggtgaagttttgggaagatgtttggctaggtggtgaggagtcgttgttggagatgtatccgcgtatgtacagcatatctcaacaacatcatcactttatacatcagttggggtgtgcagcagaggggggttgggagtggcagctgcaatggaggagatttttcagggaatcggagattgttatggttgctaaattcatggaggacattgaaggggcggtgcaggccaaccagcaagacaattggtgttggggggcagattctagtggaagatacacagtgaccagtgcttacaaattgataagtagctgtccatcaggcgtgaataatgatggtctgttcaaggagttatggaaaatcaaagttcccaataaagtatcatgctttgcttggaagttgattcgggatagattaccaacaaagatgaatctaagtaggaggaatgtgcctctgaatgacgtaatctgccctttttgtagtaactgtgaggaggatgtgtcgcatcttttctttggctgtgacaaatccggcctctatggtgggaagcattatcgtggctaaacatcgtcggtgtttacccggaaactcctagagatcactttcttcagcacacacatggttatctcaagggcataagatctcagcgctggcaaacatggtggatgtcattgacgtggtgcatatggtaccataggaatagggtggtcttctcaaatgaaggtttcaatgatcaaaagttgttggatgatgctgtttttttctgctggtcatggctcaaaaatctggaaaaaggatttgatatccctttccatccttggccaaaaatataaggataggattttgtaatcaggggagggtggttttataggatattttttgtggaggggtacaaagacctatatagtcttatggactcctaattcttgcaatactgcagtattaggaagtattatggctccataggattacacatagtagggcatcaatgtaaatagaaaagtaccacttgtactcatctatatttaatataatacatatattttgctgataaaaaaaaatgctcttaaaaaactcaccatgattttatattaaaagtataaaaaggaaatttatagatcagaaatatcaaacttgaagagaacagatacctctccagtctgagatgtatacatcgccatcttcagtgtgatacatccatcttagatatgacttttcttcaccataaacgggtctaaggaaccctattatagaaacaccatttgaaggatggttcattcttttaacatataccatgttgttgatggcctataagaaaattcataaaggatcaatgttatttcttccagagcctatgaatctgttaaatcattctcatgctgaaacttgaaaattagttatcagttttcttcttttttttttgtgtgtgtgcgtgtgtgtnnnnnnnnnnnnnnnnnnnnnnnnnnnnnnnnnnnnnnnnnnnnnnnnnnnnnnnnnnnnnnnnnnnnnnnnnnnnnnnnnnnnnnnnnnnnnnnnnnnnnnnnnnnnnnnnnnnnnnnnnnnnnnnnnnnnaccttttttaagcactttgagaaataaattggatgaacagagtttgtagtatcagactgtccccaattcactggaatattaaactcctccatttctgaaacctgtttgcagaagaatatacttgtgatttgaatttctcagatgcataaaaagaaacaattagtaactaaaacaactgactaaatttcataatttaagcatttgaaaaggcaaacctcaatatcatcatcatcaaatttgaattcatcatcgttgccattattgaaaatgtcatattcactagcagtccttctattattatcatatattgggatgtccattccaaagaaagcattctgaagaaacacggacttagaatatcaatttcacaacttctatgtcaaagatagggatggaatgcaaaaataccatgacaaaactacttcagtttatcatccaaactacaaatttagctctttaatagttgttgcacaaagacagttgaatcacttaatactttaaaatgactacataatctctggatctatattaataatttcatataatttgaaataaagtatctcatctatgactggctttttattttgggagaagacatgaaatctaactgggagtcccaattacataaaaaataaagaaaagaagagcatcaagggaaaagtaggtgcaagagattagaagcctaagacttataagttataaccagaaatattgtgcacagaggtttgacagaaagacccatcacatgattcccagaagcaaagcatttgggggttcttaaaatgtttactacctgcaaattccatcaatatttttaaaaagagattaaatatttttttttttttataaaaataattcttatcagatgggaagacaaagaagtaaaagaacaaaggatatggaatattcattagagggaagaaaaaaaaaagctcaacagcagaacagctaagtatatttggccaatctcttagcatgtataacaaagaaatccctttgaaaacggatacaaaattcctaccacaggattgttggctccacaatccgccaaaaggtttgcatcatcagagatttcaaaatatatatctacaggaaaaaaaaaggaaacaaaagcaataggttataattataaatgtttattactgaatcaggaattcattaaggtaactaataattctcatttcataaacaaaaatatatgcataacaaaaagaaaacaaacctccaacatcatcaatatgatattgaaactcagcccatgaaatctggtcatgtggttcacagtgtaccattccaggaaatactagcaaagcgcttttattagcctaatgccaacaaacagggcatgatgataaaaagtatacagatacagccaaaatgcgcccagcaaaatggaaacatcatattatgtgtactaggtccgtagccctagatatcacaaattaacttgtttcatgtgcacaaaagcatataggcacaaacctctacagttgtttttgctatttcagcaggagagagtctagctggctgaatatcgttggaacctttcagttcttcaagaggatgataaccttgttcatccatgtgatcagaagaatcgggtatagaatctgagtagtctgcagcaacattaacctttgaaaggcacagatcatgccctgtggatagccaaaggaagtgtggtgatccaaaaaatggacttttgcacctaaagataaccaaaactattttcagtaaacaaagcattttagatctttcacgaagaataattacctggacaagaattgactagtgacaagaaaaaaacctatataaataattgcatctatcacagttttttgaattttcaaacaacacagtaaatggaatatttgattgcagaatcaggagaaggaagagactaataaaaatattttgagggttctaggtacttcatctgaaataaatattaggttaccggtagtaaaatcatgcaacaaaactaaaatcctagcatccatccaggattcatgtgttagggttataaaaataacttggactccgcttaacaatttgagttctagttaaagtgtgcgtaaaactaaatggattaaacctgctatgctatatagataattttttttttttnnnnnnnnnnnnnnnnnnnnnnnnnnnnnnnnnnnnnnnnnnnnnnnnnnnnnnnnnnnnnnnnnnnnnnnnnnnnnnnnnnnnnnnnnnnnnnnnnnnnnnnnnnnnnnnnnnnnnnnnnnnnnnnnnnnnnnnnnnnnnnnnnnnnnnnnnnnnnnnnnnnnnnnnnnnnnnnnnnnnnnnnnnnnnnnnnnnnnnnnnnnnnnnnnnnnnnnnnnnnnnnnnnnnnnnnnnnnnnnnnnnnnnnnnnnnnnnnnnnnnnnnnnnnnnnnnnnnnnnnnnnnnnnnnnnnnnnnnnnnnnnnnnnnnnnnnnnnnnnnnnnnnnnnnnnnnnnnnnnnnnnnnnnnnnnnnnnnnnnnnnnnnnnnnnnnnnnnnnnnnnnnnnnnnnnnnnnnnnnnnnnnnnnnnnnnnnnnnnnnnnnnnnnnnnnnnnnnnnnnnnnnnnnnnnnnnnnnnnnnnnnnnnnnnnnnnnnnnnnnnnnnnnnnnnnnnnnnnnnnnnnnnnnnnnnnnnnnnnnnnnnnnnnnnnnnnnnnnnnnnnnnnnnnnnnnnnnnnnnnnnnnnnnnnngagtcactcaaaatagatgattatcatactgatatggatcatggatgcaaatacgtctaaaacatcttcccatattttcctagtctcgaattaaaaaacaaactgtatgatcccacatgtactataactaatacagttctataagcaagagaaagctgaataaggataaataatcatccttcatgtaatgtaagcaccttgtgctggcaagatcatgccaccttcggccatcaataggaagtttgattgaattgcttgtttttccataagtagagcaacatatcccctctacaaggcacacaatgttgaacaaagatgaaaacaccatccaatagaaagagcactcgaacacaatttaaaatctcaagtcaaagacgttaacacgtgtagtgtaggtaagtatctcaaatcgcataaaacaaaagaaaatctcaaaatgtataaaataattaacaatcatctaagctatatcaatcgaaaacaaaaatctactctgaatcagaattttgcactcactctcatgatcaaattcctaaaatctgcaattagccttaaatttttggacttcttcacaatctgaagaccgaatacattacaaaaaacacttttaatttattcatttgtttattttgctccgccgaactccacagttctattattgtaagagcaaatgaataaataatataagtcagcattcttcttctttaaaactcgattgagcctcataacttgagaacattttcaccaacgtatgcatgcacgagcacgaaaatttcttataaaggagtcgaagcaagtttctaaaattttgcagaatccaaacagaaaagagaaatagaaacaaaaagcagtaagctcattcgttttattgagaaatgaaataacgaatgagttgaaagagtaacaggaattcggaaattgaatagcagagaaagaagatacttaccagaagacgagggaagtgaagaagcagcaggaggtagaatagccatgaaatggaagatttgggaagagagggaaagtgctttttatatgacagttacagtgatagtgacagtgacggggcgctaacaaacagcgactctggcagaaacatgacgatggcgtgtgtgcgcgttgtgctctgtttgtgcagtggaaagtagaactcaacacgggcttctacttctgcttctgcttctgcttctgcttctcaagtgaacacaaaaatgaaaaacctcactccaactttttcgatcctctcctgccgctgcagcacgatcttccttgcatcctaaatccgaaccgttgattattttctatttcttgtttaattatgtgcaataattaatcaatggttgtgatttaacaaaattttggctccgtataaaattgggtagaaaatatctattttgcctgcttcttacctaaacttctaaggtgagccacatgtgcttcatgggcttgcttgctattggttgttattgctcccaacactcttgctattggtccttacaatataggcaagatatttttctctccaaaaatgtcatttttatagaatcatgatttccttattatacacatacaacataatcatatttttttacctccgaataacacaataaaaatatgtttacgttatgttataaaaaagaaaacatgttttgattgtattatgtataagggaaacatgattatattgtataacacacaggaaataaattttcaaatttaatttattttttatatttgaggtgttttaacgaaatagtgtttgtcgttaaatctctgcatcacggcgtgctgcgcagtcacacgttgacgcctgtctgtctcagcaagctcaccgacatcaccccttccattggaggttgcatccaatcacatatgatatcccttttcttgcaagccgtcaaaaatctggaaaaatataattgagagtaacaaatataaattacaaatttgaaagatcttaagaataaaaatcacatatgatatcccttttctttcattcttaaaactaatgttaacacaatcactaatgtactagtattttatttgcattttaaaaatattttaaaatagtactttgaagaaaaccgactctacaaattttttttttcaaaaaaaaatctcaaaagaatataaaaccatttatccgtgaaaaacattaggtaatttaattatcaattgtagtatatatgattttgggattaagatcttctgcctctatacaccaataaattactgatgccaatgtggaagatattcttttgaaagcaatgtgaaagattttagacattaaaattatttaattttttgtataaaatactatacaattatgtctaaaaattataaatggatggaaagaatttaacttacactctctcgtcttaaattttaatggagaaaacttgtttccattgctttggatcgagttaactcacattgagagaagttttccatgttatattttgattttttttttatgcttttgtatctcttttattactattgcagtattactgttaaaattggcttagcttagatacttttctggttagtttgcaacaagaaggaaaaatttcgtttagctcttaatatttcgttgtgtactttgatcccaacatgtgtatcatgccatgactcatgagatgataacctgtttgcatagttttattttgatacaatttgtttaggctggcgaatccttatccttaatctcaagcattaaacacaacttaattaaacataattaatctatgtgatgaagatgcatggataagaacacacagaaaatattcattcattattatttgcaacatgaaacgcttgttccacatacattcaacaagccgttttatttccttttttcaagaagaaacttccaaacatccatccttttaattgtactattgtcccctttgccctgagcttacatgaacactgtaaaaagaaagaagaagaaaaaccaatgtcaatgaaaacaaaataactaatgatgactaattagtatgatggattaatttttactaagataaaaataaagttaaggaaataaaaagaaagcttacttgttacaattggtgttctgcttgctcatgataaaacccaaatcaacaccacataatttaggaagtgaacctgccgtgttttctagcaaggaaggaaggcgaattgctacgtcgaaaaagcacttacatgcagccattcgttgaatttgtgttggtgctgatgttttcactgcattaacactttggcaacaattacacctgaagggataccatctccaccaatgaggtaatccacgcacgaaattaacaagttattcacttgtgaacaattgtagtcatttggtgctgaatttgttgtaattggtgcctctgaagctgtagcagctgtgagaacaaatacaactagaagagctaaaaatgtgacaaacactttcttcattttgtgaagctagtagtttctatatcaatgaactttatgggattaatttgcttgttttttatgggatgaattgaaggttgagaaatgtacgtgtgagatatatatagctacaaaagttgacgcaagcatgttcaagtggaatccacgtgatgtgctccaattgcaacaatttattaaagcatattaatgcatgagctagcaaacaaaagacaccgcttgatcaaatttgcatttaatgcgctgataaaataaatgcaattaatgtgaattcaagttctaagagaaatgacgcactgatcaaaaaaatttcaagattggctataaataaatgaataaacctgttttagactaagggtaaaatgatattttcattaaatacccatttattttccttttttttttcaaatcaaacatccgcaccaaatttagtttcactcttttctattttatttcactttaataaaaaaaaaatattgatttacactttatttcttatttatttgtctgcttttcttttctaactattcacttccattctttccattttcttcctcaccacaaaactcaatgataaggagtcactctcattaaaagtcattaaatatctaaattatatgaatttaacgttggagtagcgtaacttaataagcattaaattgttttattcttaaattaagagtcattaaatgaatatcttttttatagagagtcattgaannnnnnnnnnnnnnnnnnnnnnnnnnnnnnnnnnnnnnnnnnnnnnnnnnnnnnnnnnnnnnnnnnnnnnnnnnnnnnnnnnnnnnnnnnnnnnnnnnnnnnnnnnnnnnnnnnnnnnnnnnnnnnnnnnnnnnnnnnnnnnnnnnnnnnnnnnnnnnnnnnnnnnnnnnnnnnnnnnnnnnnnnnnnnnnnnnnnnnnnnnnnnnnnnnnnnnnnnnnnnnnnnnnnnnnnnnnnnnnnnnnnnnnnnnnnnnnnnnnnnnnnnnnnnnnnnnnnnnnnnnnnnnnnnnnnnnnnnnnnnnnnnnnnnnnnnnnnnnnnnnnnnnnnnnnnnnnnnnnnnnnnnnnnnnnnnnnnnnnnnnnnnnnnnnnnnnnnnnnnnnnnnnnnnnnnnnnnnnnnnnnnnnnnnnnnnnnnnnnnnnnnnnattcccacaaatattgataaaatttgtgggtatagagagtatgagatggatttttactcaatggaattggtgacgaggactactacacgtttacatgtatcagtctcgctctaatgtcatccttaattcaaacaattnnnnnnnnnnnnnnnnnnnnnnnnnnnnnnnnnnnnnnnnnnnnnnnnnnnnnnnnnnnnnnnnnnnnnnnnnnnnnnnnnnnnnnnnnnnnnnnnnnnnnnnnnnnnnnnnnnnnnnnnnnnnnnnnnnnnnnnnnnnnnnnnnnnnnnnnnnnnnnnnnnnnnnnnnnnnnnnnnnnnnnnnnnnnnnnnnnnnnnnnnnnnnnnnnnnnnnnnnnnnnnnnnnnnnnnnnnnnnnnnnnnnnnnnnnnnnnnnnnnnnnnnnnnnnnnnnnnnnnnnnnnnnnnnnnnnnnnnnnnnnnnnnnnnnnnnnnnnnnnnnnnnnnnnnnnnnnnnnnnnnnnnnnnnnnnnnnnnnnnnnnnnnnnnnnnnnnnnnnnnnnnnnnnnnnnnnnnnnnnnnnnnnnnnnnnnnnnnnnnnnnnnnnnnnnnnnnnnnnnnnnnnnnnnnnnnnnnnnnnnnnnnnnnnnnnnnnnnnnnnnnnnnnnnnnnnnnnnnnnnnnnnnnnnnnnnnnnnnnnnnnnnnnnnnnnnnnnnnnnnnnnnnnnnnnnnnnnnnnnnnnnnnnnnnnnnnnnnnnnnnnnnnnnnnnnnnnnnnnnnnnnnnnnnnnnnnnnnnnnnnnnnnnnnnnnnnngttttagtctttttcacatctcttatatttcctccgcttttctatagcagtacttctttgtaaatgttactcttgtatctatatttatattgtttttgctaaatgctaagcatatctaaattaatatttgaatgaccataattgattagtataacctccttaatcattagggtaacttttggaattcacgtaattgatcagttgtttgtctctaatcaattggatttttacaaaaaatccacttatgtttttctaaagaaaaaaaatacaataacagtataaaaattacttaacataatgctcaacgaaatgaataaatttagggcatatttatttaaacgcaaaattcattattttcattgtgacacctcttaatataaaatctatgactgaaactaatttagacatacatctcaattacattcagtaatttgaaattatttctgtcaaaatcaattctactcagttttaaaaccaacaagtcttcattttgcatttcatagttaattcattgccttacattatgataaatcaacaaaagaagcccttggttgcccctgtcaatgcttgaaaaatggaaatatattcccataatctcaggagtaattggcacatgatccctgctgattgctgctaagctcagaacatggccaagggctaacttgatgagcaaatccagacacatcagaacacttccaaggtggagttctaggtcctgtcactccatgaaggttgatatcatataggcaaatatcagtgaaaggtgaatttctcaacccttgtatcaagccagcctgcaaaaccttcacaccccaaacattcttaattgtgacacccttcacaagtgggagagctttggcatcaaatttgtcatcagggtggtccccaacatcacctgagatccttattcccttccttgcttcctccatatacacatgagacatggttatattctttataaatccacccctgccagtgtttgtcttaatgtggataccaattcccatgttgtaaaggttgatgtgctcagcaagtacattctccaccccaccagaggtttcactgccaatagcaatcccagcaaatggagacgatccagttacacgccggatcgtgatgtcagagctaggacggccataagcaatcccatattcatcccatccactcttcacagccacaagatcatctccagtagatatgtatgaatcctctatgcacacatttgaacttgaatctgcataaacgaattgatatttgtatgaatggatatacaagggttcttttacttgtcataccaacaaaatggtgccataatatttcaaccaccagatgcctgtgggttttgcccttaaacaacagtatttaagtgttggtttattaactacgaaggaaagaaacataaatacagaactttagagtacttatcaaatttgagtgcagtttgtctccgaaatgaaacaagacatactgatcttagaagggaaaaattactataaccaaaatgcattgcttacaacaataaaatgagatcagttagtaacttagcatagtgtttgactatttcaattggttgtatctatttcactatttgcacaagatatggcatatttagaagaggtgtactctctaacagtcattcttacaaactctatcatcagttgaaatttattgaaattgtaaaattataagtgaaacttgttaaataagaagatagtctcataatttttaattttcaataaatttaaaaaaatgtgttgctagcctttctatatttagaaagcagttactacttacccggatcaatgccatcagtatttggagagtcacgaggagccaaaatcgtgacatatcgaacaacaacgttgctgcaaagaagttaagacaatatgcaatcagatttcagaatgagatctagttagtttaaagaaacaaagtaacaagtttataaagaattggtacaaatttgtttataaaattttcccacaaacattatggtaaaacaatgttaccaaagattaaataaaaaaaggacataaggaatgccatgaacacactttataaactccttatgacctaaagtggcatgcatatacctgctgtaaaccgggtgtatgttccaaaagggagaattcttaaagataacatttgaaataataatatctctagaattcacaaattcaactaggtttggtctggtaaactgaagagttccctgcctccacttattccaccacgcatctccttgcccatctattgtcccattttcacctatgaaaatatgaattgtgtgagagaaaggtatagtttggacacaaaatcctgtaaccataatagagaaactcgcaggatcaaagatttccactcaattatgaatatgcactatgcagtataaagcttggaataaataaaacatgcacagatattgtaaagcttttatcctttgtccatcatccaccaaacaatatacaagacaaaaaattgtcatgtaattcaagtatttgtcatgtgctgcacccttaggtgcatcaaacgcacctttaattaaatatgtttataaatattatcgtagtatactatgtggtctggtacaaaccacaaaatcagattagatgtcctaaaaaataggaaacataagatacccacctgtgattaccacatcctgaactccatcaccatggataaaactcatataccttcctccaggccgttcccttcctcttccataagatggcaagggtgcaatcaaaggccaattcaatgaatcctaatgaatcaaacaatgaagggaattaattagaaagtggagtccttgtccatctgaaacttatctatttgtttccttttttctctttaaacaataaaatgtttaagaaggaagaaacaaaggtgtttagctttaattgagcataccatgaaaacgttattcggatatgaatttattgtaatttttttatgtagataactacctggcgatgaattcattgtttttgggaataccaaggataaagaatgaagagttctgcattcatatgcaccatttcactaactatgatattcaaaataaatcaatttagcatagatataatcatcatcatcatctcagtttgtgttgtttaaccacacgaactatagtaacaaggtttaatgccagaagaataagtgagtaccccacttccacttgattatcaaagaaaaggacagtaattgtcagaaatccaagctgcgatataaataattggctaaagccataaatgtcatgcacatagtgccatgcattgatgaagactagacccccccccccccnnnnnnnnnnnnnnnnnnnnnnnnnnnnnnnnnnnnnnnnnnnnnnnnnnnnnnnnnnnnnnnnnnnnnnnnnnnnnnnnnnnnnnnnnnnnnnnnnnnnnnnnnnnnnnnnnnnnnnnnnnnnnnnnnnnnnnnnnnnnnnnnnnnnnnnnnnnnnnnnnnnnnnnnnnnnnnnnnnnnnnnnnnnnnnnnnnnnnnnnnnnnnnnnnnnnnnnnnnnnnnnnnnnnnnnnnnnnnnnnnnnnnnnnnnnnnnnnnnnnnnnnnnnnnnnnnnnnnnnnnnnnnnnnnnnnnnnnnnnnnnnnnnnnnnnnnnnnnnnnnnnnnnnnnnnnnnnnnnnnnnnnnnnnnnnnnnnnnnnnnnnnnnnnnnnnnnnnnnnnnnnnnnnnnnnnnnnnnnnnnnnnnnnnnnnnnnnnnnnnnnnnnnnnnnnnnnnnnnnnnnnnnnnnnnnnnnnnnnnnnnnnnnnnnnnnnnnnnnnnnnnnnnnnnnnnnnncccctcccccacacaaaactttctatcctttcagcatggacccaccatagatcatggagattatatgtttcccacgatccattacaatcatctatagtccatactccataccaccaatcatacggataaacacgtacatatatggactcaattcattggtataaccataagcttttaattgtaacatctttttttttatgcacgggaacatcagatgtacaatttcacatgtactctttaatgttcctttctctctttttcctctattctcctcgttatatttggtagtcggtgaagagtttgcgaacatgattttgcatagcaaggtttctataaggggaaaaccttatgcaaacttaactaagccaatcaaaaggttacatacaacagcaaacttaatccatgtcattaatataactttataattagcaagcattccgtacaaatatttcagcaaatacaggatatataaatagaattgtaaacaaaaggctcataattaaatcaaaataattggaattacacatgcgtcatatcatttttaaggaagagtagactaaaagagtaaatcacccgcaatatagtgtatctaatttaatagtatgaatttctatgtttcggggagaaaagttagcataaaaatgaatttgaaagtagctttaggaaaaaataatatagaaaaaattaagtattaataatatgacaatttttaaaggaaatttgattattttttaaacaattacaaacttgtctgtcttaaaaaagtacaataaaaaaaattatttcatttttaactcgagattgtaaatactactttattatatacgtattgataaaatacacagacaagataagattggctttgttgcatgatgctcaaatatgcacaatgtccacttacgggggaaagtgcaaacaaaaaataattaagcacgctagtaataaccttttccgacatgacaatcttttgcttgcatttgcataaaattccattgacttctctaataaatttactttatagtataaagtgagtaattttaactgttaacaagagaattaacgattaatatgatgtacaatacataataaatcatatatttatatttattaaatattacttactttactttcataaattatttccttaataacaatcaatcacactagaagatatttttttttacaaaacacacactagaagagttaaatctcataaattatttccttttataatacataataagttgattttagttaagaatttaatattaaaatttagggattggtaacaagttagagataaaaaaaatagaaaaacatttaattatagataacataaaaactaaaaagcactacattgaataaaaataataatgtttgttgtacaaggaattcaaaaaatattcaacagttcgtattttgggtagtgatttcgcagaagagtattaaaagacattggtaaaagaatcttcattctaattactcaaaaaaataagtacttaaataatttgcatgcttctaatgtaataaataaataaataaaaatttactaaacattatttttttttatcagaagaataaaagataaataacgaaaaatttacaataaactgtcatactttattgaaccaactaaaaattaaaccctattggtataatcatttattttaattattttctttatccactaaaggatactaaaatatattttgtaaaataattataaaaaatggtttggggcctttggggtgcgtttgtttacctgggtggccatgataacggcaccggcagcgagatacagcgtcatgtggctggtgaggttaaagggctccgttaagtacaccccgggaggcacataaaggagcgtgcctccttctcgtggcaagtgctgaaccctatatatggcctctctgaaggccttcgtgttgagggtgcgtccatcacccacgcctccaaactccgttatggaaatgttgtcggtgcggtgccccaactccactatgttcgaacacgacaccgtttcaccctcgcccaacactaataaccaacaacatgagaaaaacaccaacaacgctaacgttgagaatccgaggagcattttcccaaatcagaaatcagattcggagaaaccgaagaatgaaggagcgtggtggatatatcactgaatcagaatgaaggaaaaatgactctaaagttataagagcacttgatttgttttgttttgtttctagtactctgtagtacttagttggtgaaagcattaaactggtagtaatggtatggttctattgtgttgtgtcctcctactgagaaaaagaatctgctgtaaagttgtgtatatgataataaatgaaatcagatggaggaccacataaaattatataatacatattgcatatttctcttccctttattaattattcttgttttgccttgcttaatgtgaaattgtgtgatgaatgataattagtactagttacagatgtctttcaaaaaaattaatagagacaaattgaaattgaaaagttaataaaacagacatggtcacatgggtatatatatatgtatgtaaaggtatttaagtaatttcatctatataagcagtacatgggtacattgatatccactcccatctttctaataaacaggtagagtaaaaaaaagttgtttaaattagtcatgagtgttaatttgactatccaattcgatttgttatgaagttaactcgtatttggggatgcgtatatggatatagattctttgattgttttgttaagcctgcaaatcttatggataatagaacctatttttctaaagtttgaatttaatgagttctgaatctggcctgttaagtttatagatctgatagactttattcgtgaattactcattactcatttaatatgattaatttgttatgttaagattgtgatctttaatttaggttattactattaatttgttatatttaaaatattggtatattgtagtataatagattttaacttaaaaaataaatcaatgtttttctaattttatacatttttcattttataaaaattattttttaaattactatttgagttcacaaattgatttgtttattcgcaagtttttgcgggtggaatacataccttgaaaaaatgtttatttacatcatagatcaagcttatatgcccatctaaaataggggctttgtaggccagatcggtctttataccaaccctaatcgtatgtatctgcaaacatttgtcacccctagtttggatggataatgttgtgatctctatccaaggagttggtgaaatatcaacagtggttgatgcacaaagaattcaagtaaatattctggccaatgatgacgatttctgacgaggtgagagacctgcaatcacttgcacaaaacactttgatgctaaagtcaaatagtgtatggagatgtgtaaaataaagttagctttttacttgtaggaatgaaatgtgacatgtgacaagcccgaatgagatctataatagttgtcttttaagtcaatgttgctaagaataactaacttagacttaagatataaagcgattttaaatattacattcataacaaatacgatagtatctgttttcatacacatttaaaaaaaatacttacacatgctctcatacccaaatggatagcaacttttggcttcattctcatatatgttggatatccatatattcataccctcacttactacccgttctttattaatattataaagccaataaattattagaaaaatactagttaagaaattactacaataaatttatgtccttccaatgtatttgtagttatttcaatgtatgaattggtatgaaagttaaaagtaacattacacaaagctatttgtatgaaatttatactattataaaatattaacattatggaagttttaatggaaaatagcttgatatgatatcttgacaaaaatttacacgcttgaaggtaaaaaggcaaacacgatttatctgtaacatttgtttaagcacgtgacagtaaaattgctcgacattacgtctgtgaaaggaaatcagggttccctgtgcttgcattaaattataattaatatatatatatatatgagattattcacataaataagatattttaattaaattaattcatataatagttaaaggataggtaagggatggttactggagtatttatacttacaatcgtgtttgttaaaaaattatacaaacatacacatcgaactcatcccgaaacatatatttattctatccatttacaaatatttttattggtacatatagggtcttggcaccctttatcatccctaataagataataacttatttcacttaattttattttgatataagttgtttaggttcttagatcattatccttaatatcaagcattaaacaaaaatgatttaacctaattgaacacaattaatctgtgatgaaaatgtatggacaagaacacctaaatttatttcattaattattatttgcaacatcaaatgtttgtttcacatatgttatacaagttgttgtttttttggaagaaagcaacttcaaagcatccatcctttttattatactattttctcctttgccctaataatgagcttaaaaaagtttttatcctaaagttgtaactggtgcccttggcggccctgcctttggtgggcccgaatttgtaattggttcccttggtggcccttccttgggtggtcctaaagttgtaattggtgctcttggtggccctgcttttgatgatcctaaaggtgtaactggtggctctggctctgaagctgtaactagtggctttggttctgaagctgtaactcgtggctttgactttgaagttgtaattggtgcccttggcggccctgcttttggtggcccaaaagttgtaattggtgcacttggcggttctgcctttggtggccctgaagttgtaattggtgcccttggtggtccttcctttggtggtcctgaagttgtaattggtgctcttggtggccctaaaggtataattggtggctctggctctaaagctgtaacgggtggctctggctctgaagctgtaactgtaagaacaaatacaaccattagaggaaaaattgctacaaacactttcttcatgttgtaaaactaatttttatctcaataaactctctaggatatacttgtattttgatgggaatgaatagaaggttgaaagaggtatcatctatatagctacaaatgtggtacattgaccaccttaatgatgtaaggtgtggttatgaaagattggcttcttattattaattttgcttggaatgtgttccttggaatcacaaaaaatgataaaatattaattgtatattgttcatttcctaatattgctttagtaactttaaattgttgtgatgacatcaaaatttatgtttgtttcatgcatttaatttatcacatttttttacaaaatatatactaaaatataaaacgttaaaaaaatattatcaatataaaattttaatnnnnnnnnnnnnnnnnnnnnnnnnnnnnnnnnnnnnnnnnnnnnnnnnnnnnnnnnnnnnnnnnnnnnnnnnnnnnnnnnnnnnnnnnnnnnnnnnnnnnnnnnnnnnnnnnnnnnnnnnnnnnnnnnnnnnnnnnnnnnnnnnnnnnnnnnnnnnnnnnnnnnnnnnnnnnnnnnnnnnnnnnnnnnnnnnnnnnnnnnnnnnnnnnnnnnnnnnnnnnnnnnnnnnnnnnnnnnnnnnnnnnnnnnnnnnnnnnnnnnnnnnnnnnnnnnnnnnnnnnnnnnnnnnnnnnnnnnnnnnnnnnnnnnnnnnnnnnnnnnnnnnnnnnnnnnnnnnnnnnnnnnnnnnnnnnnnnnnnnnnnnnnnnnnnnnnnnnnnnnnnnnnnnnnnnnnnnnnnnnnnnnnnnnnnnnnnnnnnnnnnnnnnnnnnnnnnnnnnnnnnnnnnnnnnnnnnnnnnnnnnnnnnnnnnnnnnnnnnnnnnnnnnnnnnnnnnnnnnnnnnnnnnnnnnnnnnnnnnnnnnnnnnnnnnnnnnnnnnnnnnnnnnnnnnnnnnnnnnnnnnnnnnnnnnnnnnnnnnnnnnnnnnnnnnnnnnnnnnnnnnnnnnnnnnnnnnnnnnnnnnnnnnnnnnnnnnnnnnnnnnnnnnnnnnnnnnnnnnnnnnnnnnnnnnnnnnnnnnnnnnnnnnnnnnnnnnnnnnnnnnnnnnnnnnnnnnnnnnnnnnnnnnnnnnnnnnnnnnnnnnnnnnnnnnnnnnnnnnnnnnnnnnnnnnnnnnnnnnnnnnnnnnnnnnnnnnnnnnnnnnnnnnnnnnnnnnnnnnnnnnnnnnnnnnnnnnnnnnnnnnnnnnnnnnnnnnnnnnnnnnnnnnnnnnnnnnnnnnnnnnnnnnnnnnnnnnnnnnnnnnnnnnnnnnnnnnnnnnnnnnnnnnnnnnnnnnnnnnnnnnnnnnnnnnnnnnnnnnnnnnnnnnnnnnnnnnnnnnnnnnnnnnnnnnnnnnnnnnnnnnnnnnnnnnnnnnnnnnnnnnnnnnnnnnnnnnnnnnnnnnnnnnnnnnnnnnnnnnnnnnnnnnnnnnnnnnnnnnnnnnnnnnnnnnnnnnnnnnnnnnnnnnnnnnnnnnnnnnnnnnnnnnnnnnnnnnnnnnnnnnnnnnnnnnnnnnnnnnnnnnnnnnnnnnnnnnnnnnnnnnnnnnnnnnnnnnnnnnnnnnnnnnnnnnnnnnnnnnnnnnnnnnnnnnnnnnnnnnnnnnnnnnnnnnnnnnnnnnnnnnnnnnnnnnnnnnnnnnnnnnnnnnnnnnnnnnnnnnnnnnnnnnnnnnnnnnnnnnnnnnnnnnnnnnnnnnnnnnnnnnnnnnnnnnnnnnnnnnnnnnnnnnnnnnnnnnnnnnnnnnnnnnnnnnnnnnnnnnnnnnnnnnnnnnnnnnnnnnnnnnnnnnnnnnnnnnnnnnnnnnnnnnnnnnnnnnnnnnnnnnnnnnnnnnnnnnnnnnnnnnnnnnnnnnnnnnnnnnnnnnnnnnnnnnnnnnnnnnnnnnnnnnnnnnnnnnnnnnnnnnnnnnnnnnnnnnnnnnnnnnnnnnnnnnnnnnnnnnnnnnnnnnnnnnnnnnnnnnnnnnnnnnnnnnnnnnnnnnnnnnnnnnnnnnnnnnnnnnnnnnnnnnnnnnnnnnnnnnnnnnnnnnnnnnnnnnnnnnnnnnnnnnnnnnnnnnnnnnnnnnnnnnnnnnnnnnnnnnnnnnnnnnnnnnnnnnnnnnnnnnnnnnnnnnnnnnnnnnnnnnnnnnnnnnnnnnnnnnnnnnnnnnnnnnnnnnnnnnnnnnnnnnnnnnnnnnnnnnnnnnnnnnnnnnnnnnnnnnnnnnnnnnnnnnnnnnnnnnnnnnnnnnnnnnnnnnnnnnnnnnnnnnnnnnnnnnnnnnnnnnnnnnnnnnnnnnnnnnnnnnnnnnnnnnnnnnnnnnnnnnnnnnnnnnnnnnnnnnnnnnnnnnnnnnnnnnnnnnnnnnnnnnnnnnnnnnnnnnnnnnnnnnnnnnnnnnnnnnnnnnnnnnnnnnnnnnnnnnnnnnnnnnnnnnnnnnnnnnnnnnnnnnnnnnnnnnnnnnnnnnnnnnnnnnnnnnnnnnnnnnnnnnnnnnnnnnnnnnnnnnnnnnnnnnnnnnnnnnnnnnnnnnnnnnnnnnnnnnnnnnnnnnnnnnnnnnnnnnnnnnnnnnnnnnnnnnnnnnnnnnnnnnnnnnnnnnnnnnnnnnnnnnnnnnnnnnnnnnnnnnnnnnaaaaataaatacatgttcaaggatctaactaaaaaaaataaaaacctaattataaattatgaaatagtttaagaacctgcaattaatataaacttcaattcattcaatattttttttttcacaaaatgactcttaatttgaaaataaaatagtaaaatactagtaacgaatatattcaataattctcaattttcaaaatataacaaggtttattgctgcgcaggttgcactactccaaaatcaaaaagtagttctattgacttaattgagatattcagtgaactttaatttgagaatataaagtcaataaattattagaaaaatactagttaagaaattattacaataaatttatatccttccaatgtattgtagttatttcaatgtatgaattggtatgaaagttaaagtagcattacacaaggctatttatgtaaaatttacactgttataaaatattcacattatgaatagttttaatggaacatagcttgatatgattatcttgacaaaaatttacacacttgacgataaaaaggcaaacacgctttattcttaacatttgtttaagcacttgacaatagaattgatcgacattacgtctccgaaaggaaaccaaggtttcatgtgcttgtcattaaattttatatatatatatatatatatgtgtgtgattattcacatatatagaatattttaattgtattaatgcatataataggtaaggtagagttactagagtatttatacccactcttaaaaaattataaataaacatacattccgaacttattctgaataaacatgtatttattttacccatttatagatatttttgttggtacatataagattttgataccctttatcatccctaataatatgataacttatttcacttagttttatttgatataaattgtttaagttattagatcattatctttaatctcaaacattaaacaaaaatgatttaacctaattgaacgtaattaatctatgtgatgaaaatgtatggacaagaacacctaaatcttttcattgattattatttgcaaaatcaaatgtttgtttcacatatattagacaagttgttgtttttaggaagaaaacaacttcaaagcattcatattttttattttgtactattttctcttttgcctttattcatgagcttaaagttttcatcttgaaattgtaattggtgcccttggcggccctgcctttgatggccctgaagttgtaattggtgcccttggtggtcctgtctttggtggccctgaaattgtaattggtgcccttggcggtcctgaagttgtaattggtgctcttggtggccctaaaggtataattggtggctctggctctgaagctgtaacgggtggctctggccctgaagctataactggtggctctggctctgaagctgtaactgtaagaacaaatacaaccattagagaaaaaattgttacaaacactttcttcattttgtaaagctaatttttatctcaataaactctatagcatagacttgtattttgaagggaatgaataaaaggttgaaagaggtatcatctatatagttaaaaatgtgggacattgaccaccttagtgacttaaggtgtggttataaaagattgacttcttattattaattttacttggagtgatagagctaaaaaaatggcgaaacattaattgcatattgttcatttccccatattactttaataactttaaattgtgatgaagtcagagtttatgtttgtttcatgcatttaatcttatcccatttgtttgcacaaaatatatactaaaatataaaaaaaaaaatataaaaatttattatcaatatgaaatttaaatttatnnnnnnnnnnnnnnnnnnnnnnnnnnnnnnnnnnnnnnnnnnnnnnnnnnnnnnnnnnnnnnnnnnnnnnnnnnnnnnnnnnnnnnnnnnnnnnnnnnnnnnnnnnnnnnnnnnnnnnnnnnnnnnnnnnnnnnnnnnnnnnnnnnnnnnnnnnnnnnnnnnnnnnnnnnnnnnnnnnnnnnnnnnnnnnnnnnnnnnnnnnnnnnnnnnnnnnnnnnnnnnnnnnnnnnnnnnnnnnnnnnnnnnnnnnnnnnnnnnnnnnnnnnnnnnnnnnnnnnnnnnnnnnnnnnnnnnnnnnnnnnnnnnnnnnnnnnnnnnnnnnnnnnnnnnnnnnnnnnnnnnnnnnnnnnnnnnnnnnnnnnnnnnnnnnnnnnnnnnnnnnnnnnnnnnnnnnnnnnnnnnnnnnnnnnnnnnnnnnnnnnnnnnnnnnnnnnnnnnnnnnnnnnnnnnnnnnnnnnnnnnnnnnnnnnnnnnnnnnnnnnnnnnnnnnnnnnnnnnnnnnnnnnnnnnnnnnnnnnnnnnnnnnnnnnnnnnnnnnnnnnnnnnnnnnnnnnnnnnnnnnnnnnnnnnnnnnnnnnnnnnnnnnnnnnnnnnnnnnnnnnnnnnnnnnnnnnnnnnnnnnnnnnnnnnnnnnnnnnnnnnnnnnnnnnnnnnnnnnnnnnnnnnnnnnnnnnnnnnnnnnnnnnnnnnnnnnnnnnnnnnnnnnnnnnnnnnnnnnnnnnnnnnnnnnnnnnnnnnnnnnnnnnnnnnnnnnnnnnnnnnnnnnnnnnnnnnnnnnnnnnnnnnnnnnnnnnnnnnnnnnnnnnnnnnnnnnnnnnnnnnnnnnnnnnnnnnnnnnnnnnnnnnnnnnnnnnnnnnnnnnnnnnnnnnnnnnnnnnnnnnnnnnnnnnnnnnnnnnnnnnnnnnnnnnnnnnnnnnnnnnnnnnnnnnnnnnnnnnnnnnnnnnnnnnnnnnnnnnnnnnnnnnnnnnnnnnnnnnnnnnnnnnnnnnnnnnnnnnnnnnnnnnnnnnnnnnnnnnnnnnnnnnnnnnnnnnnnnnnnnnnnnnnnnnnnnnnnnnnnnnnnnnnnnnnnnnnnnnnnnnnnnnnnnnnnnnnnnnnnnnnnnnnnnnnnnnnnnnnnnnnnnnnnnnnnnnnnnnnnnnnnnnnnnnnnnnnnnnnnnnnnnnnnnnnnnnnnnnnnnnnnnnnnnnnnnnnnnnnnnnnnnnnnnnnnnnnnnnnnnnnnnnnnnnnnnnnnnnnnnnnnnnnnnnnnnnnnnnnnnnnnnnnnnnnnnnnnnnnnnnnnnnnnnnnnnnnnnnnnnnnnnnnnnnnnnnnnnnnnnnnnnnnnnnnnnnnnnnnnnnnnnnnnnnnnnnnnnnnnnnnnnnnnnnnnnnnnnnnnnnnnnnnnnnnnnnnnnnnnnnnnnnnnnnnnnnnnnnnnnnnnnnnnnnnnnnnnnnnnnnnnnnnnnnnnnnnnnnnnnnnnnnnnnnnnnnnnnnnnnnnnnnnnnnnnnnnnnnnnnnnnnnnnnnnnnnnnnnnnnnnnnnnnnnnnnnnnnnnnnnnnnnnnnnnnnnnnnnnnnnnnnnnnnnnnnnnnnnnnnnnnnnnnnnnnnnnnnnnnnnnnnnnnnnnnnnnnnnnnnnnnnnnnnnnnnnnnnnnnnnnnnnnnnnnnnnnnnnnnnnnnnnnnnnnnnnnnnnnnnnnnnnnnnnnnnnnnnnnnnnnnnnnnnnnnnnnnnnnnnnnnnnnnnnnnnnnnnnnnnnnnnnnnnnnnnnnnnnnnnnnnnnnnnnnnnnnnnnnnnnnnnnnnnnnnnnnnnnnnnnnnnnnnnnnnnnnnnnnnnnnnnnnnnnnnnnnnnnnnnnnnnnnnnnnnnnnnnnnnnnnnnnnnnnnnnnnnnnnnnnnnnnnnnnnnnnnnnnnnnnnnnnnnnnnnnnnnnnnnnnnnnnnnnnnnnnnnnnnnnnnnnnnnnnnnnnnnnnnnnnnnnnnnnnnnnnnnnnnnnnnnnnnnnnnnnnnnnnnnnnnnnnnnnnnnnnnnnnnnnnnnnnnnnnnnnnnnnnnnnnnnnnnnnnnnnnnnnnnnnnnnnnnnnnnnnnnnnnnnnnnnnnnnnnnnnnnnnnnnnnnnnnnnnnnnnnnnnnnnnnnnnnnnnnnnnnnnnnnnnnnnnnnnnnnnnnnnnnnnnnnnnnnnnnnnnnnnnnnnnnnnnnnnnnnnnnnnnnnnnnnnnnnnnnnnnnnnnnnnnnnnnnnnnnnnnnnnnnnnnnnnnnnnnnnnnnnnnnnnnnnnnnnnnnnnnnnnnnnnnnnnnnnnnnnnnnnnnnnnnnnnnnnnnnnnnnnnnnnnnnnnnnnnnattgagatatttaatgatctttaatttgagaataaaataattgttatatttatgtctcataaatgaaaaaaatattcaagtttttaaaaatataaatcatcatctgttttgcaccaaaatatgtgagaaattaaatgcgtgataaattctaaagcaaacaaaattcaaaaccattaaaaaataaatacatgttcaaggatctaactaaaaaaaattaagaatctaattataaattatgaaatagtttaaggacctgcaaattaatataaccgtcaattttattcaatgattttttttcacacagtgactcttaatttgaaaataaaatagtaaaatactagcaatgaatatattcaataattcttaatttcaaaataaaacaagtttatgtttattgctacgcaggttgcactactccaaagtcaaaaagtagttctattgacttatatgagatattcagctttaatttgagaataaaataattgttatatttaagtttcataaatgaaaaataaaatatatttttttaaagataaattatcatttgttttgcaccaacggccgtgaaaaattaaattcccaaaacaaacataaattctaatgctatcacaattcaaaaccattaaagcaaaatacaacctatactttaccattttctatggtctatctaaaccacactccaaatattaaaaaaaataaataagaaatcaaaattcataaccactgctcacatcatcaaggttgacaaatgtaccacatctgtaattatataatgaacatctccctcaaccatttcatccatccacatcaaaacacaagtgaatcctagaaaagttcattgaaaaatagaaactatcttcacaaaatgaagaaagtgtctgtagcattcttaactctgcaagttgtattagtccttacaattatagcagcagagccagcagggaagggctacaattgtgaaaaggcaaaaagctcagtgacaccgtgcataaaatacctcactagtaaagttgataccccttcagctgcatgttgcaatggtgtcaaggaagtgaaatcatcagcaccaacaaaagatgaaaaaattgctgcatgtcagtgccttgaagaagtaacaactcacattcctaacttaaaggaagacagagccactgcacttcctaaacaatgtggtgttgatgtgggttttcccatcaccaagaacttcaattgtagcaggtaaactttattttatttttatttttttttacttttttttgttaaaatattaatctatacatattaatacccatcattattttactttcattgatatttttttacttcaattgtagcattgcttgagcaaatggcagaggaggaaatagtacattaaaaaggagggatgcttgcaagtagttttcttgtaaaaaataaaatagtttgttgaatttatgtggaacaagcatttaatgattaatgactatttccatttgttcttatccacacatcttcgtcatagagattaattgtgcttaattaaaatgaataatttgtattcaatgcttgagattaaggattcaccagcctaaataaattagttaaaaatgaaatcatgcaaaaataagttatcatctcatgatacgtatgttgggattataatagtacgtaataaaatattaaaatcttaaaaactctccctttcttatggcaacctaactaaaaaaaataatctagcgaagttaatttcaacaatgatagccataaaaaaatgggaaagcaaaataagaagacatcaaaatttaatgtggaaaactttccttgatttgagagaataaaaattacatgatctaatctaaaatatttttcacaatataaaataaacttaatcccacatttgatacttaacaacacttttgattccttaattttcggaaatgtgcaattttgatatctaacttttaactgtacaatttgggcctcgattttttcaagtaacaattaagtccctccatcaatgtgttgcccatttttattgatgtgatttgtctaaacggtgttatcaaagaatgaataagacttaaaataaattttgaatgagaccttttattactttaaattagattatatattagatatttttgttaacatatgacctttttattttatcaaaaaaactaatagcgaaaaaaagtctataaaaagtttgatgcattgcattttaattaaactagtgtaataagttgtatcatacacaaatataaaatttatgatttataattttttatattatatggtttttaatatacatatctattattttttaatttataaaaaatgtaaacatgtagccaaagtatgtgtgtgaatattaatgtaagattagtgtattagaaataaaaagtctgttataaatattttttttatctattattttatattttaatgtttgctcgtttttaaaagtaggtgttgacaatcaccaaacactgaattactctcaataaacacttaattatcgaattagagtcttaaaatgcaacaactatgttaaacatctatagggagattttttttgttgtctataatgattatgcgaatacgattgtttcccattggaacagaccaaacttggcaagtctttgggttcgagaccaaaaccatagtatccaatgagtatctatctacgaaaaagcgtagaaacgttccgtatttttcttcgtcgttatcgtttcgtataatagcacaacacataccatgccatggatcaattattaccagtcactgtgcattattgttgttgagtaacatagccattagccatatctctctcccatcacattctccgcttcttccactgaaatcccacatgaatgtcactctcacttcactcgcctctctcccccaatccctctaattccactgttcagctccgctacggtgagatctgggaagctagggtttgaacttcaggctcccaattagggttggattcgagcgtgttatgaaaaccaggagattaagggtgttgcattggaagtggctttggatgatggttttctgtgggtagcttcaattttcggggtggggtggggggtggggtgggttatgaaataggatcatttctgattcaaaggggcatgcaaaatttgcgacctttataacaataataatgcttttattcgacttggggtgcttcagtttttactagtttggaacttcacctattgttatagctccaagcatgaagctctcttcttctggatttaacccacctgctgaagaagaaggtagcagtggaagtagcttctttgattctttcattttgtgcaaattgctttgtattttgctgcttgccctgctcccactttttgaaagtttcttatctcttgtcttttccttggtttgttggtgtagtggtgttttttgtgttggtagttctttttgtctttgcatgggtttggaggtaggggttaaggatactctagtagtactttaacttgtaggggttggtttggcattcttatatgacatggagtgaggttgaacaagttgccatagtttgtttttgtttgtttataatatgtatttatgtcagggtcaacttcttagtgtcatgtggatttgatttgtgtttgatttgtttcaacttcttatgtgacaaggttgtattgtgtgttactatttatgtgtggttattctgtttgcctgtttgtttttgtgattggagttcggattgtggtatgtttttttttttattggtaaaatatgcagtggatttaatgagtttattactgatatgccacttgtagactgggctaaggcgtggtgcccttttgacttgtgtgaaatgatttacttcatgtttattcatattagcctgtgattgtgtaggggagaaaaaatgtttgaattctgaactttggcatgcttgtgctggccctctggtttctctgcctctggttggaagtcgtgtagtgtactttccccaaggtcatagtgagcaggtaagtaatgcttcttgtatcctataagttggatttattgcactatgcttgaatttttcgcatttcatggatatttgttgaagttgctatgctcatgaaaagtacataaagtcgtatagaaaattagaagctcatttagtatatctatatgatcacggtgagcaggacagttgtaatattttgatctgtctgccgaagttagtggagtagacttcaacttattgtttcttgtatgtgtatggtgaaatcagtcatgcttgggctagtgcaagctcatagttttaagataagattgatttggtatttgaactgataggactgggatttacaattgtctgcagtactgtgaaagtatggagatgtaagctgtaagttacatgttagcagacttcatggattagtgtttaagttgttgtgcctggagggaaggaggatgggctaattaagtgaagagaaaataaaatatgctccaataaacgtttgatttaggctttctgttgttgttgctaacattctagctcataagtgaagtccctagtaacagatatgacattgcttcattcttgaaatgagcagcattttgttaaattttaaatagaaattgtggcattaaggtttctgttctagaatagtctgagctttgatcagtctgattatcacggtataaatcttatctataattactatgctaaaaatgagtgactgacagatagagaactctttattgcatcattatggttattttcagtttcaattttttccccggggcaggggagggggttcaagccaaatggttctaatctattgttgttgcttttgaaatttccaaataactgattgcttttcatatatttcatttatatttggttcttcagttatttgatagatgttgatgtttatgttacaggttgctgcatcaaccaacagggaagtagatgcacatattcctaattaccctaacttgccaccacaacttatctgtcagcttcacaatgtgacaatgcatgtaagaataaaattaatagttgagaatttcagaaaacatttttatgtgcttacactctgaaccttttaagcatgcaccttgcaggcagatgctgaaacagatgaagtatatgctcaaatgactctgcaacctctaagtccagtacttttctcttatttgctaccttttcctattttttattttttttattttttattttttttatagcatgtcttgacattatttattttgtagcaagagcaaaaggaggtgtatctgctgcctgcagagttgggtactcccagcaagcaaccaaccaactacttctgcaaaacattaactgcaagtgataccagcactcatggaggattttctgttcctcgaagagcagctgaaaaagtcttccctcctcttgtaagtcatttatctgttatatttggttcacagtaattagtttgtcagctcttgatctgactgatgtgtttctttaatttgtttctcaggattactcacagcagcctcctgctcaagaactaattgccagagatcttcatgataatgaatggaaattcaggcatatatttcgtggttagttttttttttttttttaatttttggtataaaattatttgtggtccttgcatctgcttctttatgtccagtttatgctgtcacactcaatttcttgtaaagaaaagcacatctgatgatattctataaacttaaatctgggatcttcctttttatcattcaaaacattaaaattggagtagcatttgaagcaggacatagttttctaaggagtaatttaattgcgtattatatgactatagtagatgtacatgtactattttacttctgtcttattgcagactcatttcatccttatttgattcgctgcttggcttactttgtttggccattttcttttcttgtgttaaactttagtcaaccttggtcattttctttactcatactacatttaaaatagcattactgttgtaatttttaatttttagtcaaccttggccaatctaatttttgttttgcatgaacagtatgagagctgtgttaaggatcattatattgttgagtgtatagtcctttaatcatatacatcttatctttggctcttcctttcctcctgaagatccttttccatatcaagtttgataaattgtctatagtgaaaccaaggaatgattagcaagcaacagtcgtgatatgtggtgtcatgaaaaagctgcttaaattgttacttaaatgttttcacttctaactgcttcatattttcactttcaggtcagcccaaaaggcatcttcttactacagggtggagtgtctttgtcagtgcgaagaggcttgttgctggtgattcagtccttttcatctggtacatgtaatttttgatatttccattaaattgacctattggagattcaactccttttccctccctctatcttcgaacacagttttagttatagatatatttattatggatatatttaagcagaaagaaaattacaagagggctttagactagaaaacattatttcaaaataatgtatctgtgggagctttttgacctgataaatatgttttagcttgttaccctgcccgtatagaaatatcgtcggtaattgcatctatataggccacgggtgcatgattgaaatctattcaaatgaactataagatattattgtaattcttcttcttctttttattaggaatgaaaaaaaccagttactcttgggcatacggcgggcgaatcgtccgcagactatcatgccatcatcggttctgtcaagtgatagcatgcacattggtcttcttgctgctgcagctcatgcagctgccacaaacagccgctttactatattctataatcctaggtgtgtaactttaatgctaatgctaatgatgagaattatcaccctacaaatcacactgaacatgctcccccccctctaattttatagggcaagcccatctgaatttgtcattcctttggccaagtacgttaaagctgtgtatcatacacgagtttctgttggcatgcgatttaggatgctctttgagacagaagaatcaagtgttcgtcggtaggtatttattgtcttaaattttcctttctcttgtcactattttgggccttgctcgaagaagaaactcaaggaggacaaaaaattcttctcccatgtgaatcttagtgtttactttatacttttgtctgatgacttagagagacagttgatttggttaaattacttcttaggtccccgtactttttgaaaaaattcaaaatggtctttgatggtttgaaattttaaagtttcctttttgtaaatagctccctatgactctctaatggtagggtggattcgaggaatcttaattttttttttttttggaaactataggaatccaacccagttgctaattcaaactatagggataactgagttctctctcaaaaaaaagtataagagacccatgaagtaatttaacttttttttttttggttacaaatttaacctttaattttactttccaaatttatttatgttcctctttaaatgtggtttatcaatgaatgtgtggtgataaccacatagtactttgggttgggtgtgcagtgttctgtgtcgtatcaatgaagaaacaaatatgctgctattcacagaacactgcaattcccaatcagcaatgcgggtaactgcacatgattccatcccaactttaacagtgaaagtattagttggacccctttaaatctttatctgtgtgtgactatgacttcaacagttgtgtcagtagcaagtcgatcttgtttccctttagctttcctcaattttggttcctgccattttatgttactgatttgttggtttctaaccattattattgtattaataattttctgtatgccatttaataccactctctgctgtgcactccttttcatgactgttgatgcattacttatgtgcttccaaaagataaaaagccaaaatttttgtgactgattagccatgacaatatatgcttgtatccttccaaaagataaaagctttggatgtttagccacgacaatatttgcttgtcctttagaacagtggtctgttctaagtttttttttttttttaaacatttgaacctatactcactgtaacatgttcttgtccagatacatgggtaccataactggtattagtgatttagatccagtccgctggccaaattcacactggcgttctgtgaaggtttgttatgactgtttgattcatatagcaactatatggcattgtcatgatagaatttagcaatattatagaaatatcagagattgtgtttacagataaatgagatgatgtataatttggttttttaacttttgtctatgggtgtaggttggctgggatgagtccactgcaggggagaggcagccaagagtttccttgtgggagattgaacctttgacaacattcccaatgtatccatctccattccccttaaggttgaggcgcccttggccatcgggcttaccttctttatatggtatgggtggttttgttaagtgtcatggcattctatgggatctgtgacaatatgcttgttttactttttgtcgtgaagtacatgacatcttcaccttaatatatttcttccttccttttgtgtaagtcaggtctcaaggatggagacatgggcattggttctccattcatgtggctccaaggtgggcttggggatcaaggaatgcaatctttaaacttccaggggcttggtgttacaccatggatgcaacctagacttgatgcttctataccaggtctccaaccagagttataccaagcaatgacttcaaatgttcccagtgctcatgcttctgaggtacagaggcaagtattaccacaggctcagcctcaaaacacccttctacacaattttcaagaaaaccaggtgcctgctccgtcacaacttctgcaacaacagttgcatcgttaccacccttatagtgatcagcggcaacagcagcagcaacttaaaaacttgcctgttcagcagttaccaaatgtcatctctcctttgtccaattttgcatcaggtacccagtctcaatctcctcccatgcaagccctagcttcacattgccagcagcagagctttcctgaacctatgaggaatcatatttctggttctgatgtttcccctatccagagtctactagggtcattctcccaggatggaacatcccagttacttaacttgagtggatccaattccgttatgtcttctgcagccatgctacccaagcaaataaccgctgaacctcctcagcttccatctgctgcttctcagtgcgtattgcctcaggtggaaaacttgggaacatcacaatcaaatgtgtctgaacttgctgctttgcctccatttcctggaagagaacattctgcataccatgctgctgctgatcctcagagcaatcttttatttgggattaacattgacccctcttctcttatgctgcaaaatggcatgtcaaacctgagaaatataggcaatgtgaacgattcattatcgttgccattttctgcttcaaattgtggtggtgcttcagtcactgatttccccttaagttcaaacatgtcaacttcgagttgtgtggatgaatcaggtttcttgcagtcttctgaaaatgtagaccaagcaaatacaccaactggaacctttgttaaggtaatagctaatgccgtttgtttataggtagtatgcctttatttatatattttatgcggagccacttttgaatatcatttaccaaaattaagcaacagtttattagttaaagaatgggttcaaggtacaagttaaatatatttatataatatatttatcttcaatgttgaattggttctgttgtacggggatatttgggaccctatttttatataaagagcatattgcagctactttttatttttgtttcctcttttttgtaggactactattttctccaattagtaagtggatgttgtctactgtctaggactattactattattctaattttatatggtgatggatgtggtgtaattttgacaggttcacaaatcagggtcctttggcaggtcactggacatttccaagttcagcagctatgatgagctcattagtgagcttgctcgcatgttcagccttgaaggccaactagaagaccctaagactcagagatcaggctggcagcttgtatttgttgaccgggagaatgatgttcttcttcttggtgatgatccttggcagtaagttgccatatgccagctgttatttacgttccaagttataatatactatcttgggatttgactacatccttcattgttgctaatgtcattgacgctataggaatagtcagtaatgtttcttacatatttgataatttgaacatgtcgacatttcacaaattttttattttatgggtctgaataattatttgtaccatttttcttgttccttctattaagtttttgctcactaactttgagtataggttcattgctttgagattactgaaatcatagtccacgcagaagagtatctaattacttgcgcatgtcatcccaagtagtaaaaggctagaagaacgatgcttgactaaaaaatgaatatatagccaagaagcacatcattttagactttcctgattctgcacagaaatatttacatttgataattttgcagggagtttgtgaacaatgtgtggtacataaaaatactatctccactagaagtgcaacaaatgggcaaaggtcttagtccttctacttctgccccaggtaacaaactttctactcctgccaactcttgtgataattatgtgagtcaacaagagttgagaagttcgagaaatggcatggcatcaatgggatcttttcactactaggacactctcccatgtaaggaatattagttgaaaaattatggtggcagaattttatgttacaagttttcttatgtatggattggcccagcattcttatacacattaatggttgacatgtgattttgcaaggtctaaatagatcaacagcaaatgactgtatattataataggtgaccttgtttctgtaatggttagttgcttatagcaattattaattattactgtatctcttatttagttttgcaatcgaaaatttgggagcttcgttgttgttccattttcttttatacgcacacaccaattttccatcatatttgacaaacggtccctactgacaacttttcgtgaaattgagtttcaaaatcgacaaataaaatgtttctgatgaaaaataatttcatttaagcaatatatattgtaataaagaatatttcaaatggtttttttggagttgtcaaatataaagtttctgcagttcaaggcttcaagcataggttaatactttaaaaaagttaatttaacttgcgtatagtttttcgtttaaaaacaacaaaaaaacttatgaaaatactagtatgaaagaagtttttttccccctcttttaaaggtgcttaaaaagttttttcaattttctttcagtcgaaaaaaaggtttattcaaatagtgctaaattatttttacaacctctattcattcactttttcttttgaagttaaatatttgattcgctaaactgaacaacataattataaatgttccatgttaaaaatggannnnnnnnnnnnnnnnnnnnnnnnnnnnnnnnnnnnnnnnnnnnnnnnnnnnnnnnnnnnnnnnnnnnnnnnnnnnnnnnnnnnnnnnnnnnnnnnnnnnnnnnnnnnnnnnnnnnnnnnnnnnnnnnnnnnnnnnnnnnnnnnnnnnnnnnnnnnnnnnnnnnnnnnnnnaactaacggtgccaatggcttcctctttgaagtttcaagtttggacgctcgtagtctgcgtttaaacgtggaacctaacaaacatcgcctccctcctctcatcgtaacaaacaaatgcggttggactttggacatgtgtgtttcaattttcattgacaacaaggagggtgcactgtagcatctgtttcttcgtttattgcgacccacgtcgcggtggctccattggggttagtttctctcaccttcatgttgaaaacattaaaatcctcaatccatgtcaatagaaccaagctagtttgcttcaaaatcccttctttcccactttccaccactgccactggtaccaatttcaaagataacaatgaacctgagagtagtagtgacacagagacagagtgggagagattgctcaaaccctttgacctcaaacagcttagaagatcactcaccccaattagcccattccagctttgtaaattgttggagctccctcttgacattcccacttccatggaactgtttcaaagggctggtgcccaaaaggggtattgtcacacctttgatgcatactatctcttaattgataagcttggggctgttggggacttcaaaattatcgagaagttgttgaagcaaatgaaagatgaaggagttgtttttaaagaatcactctttatattgattatgaagtattatgggaaggctggattgcctggccaagcaactaggcttttgttggacatgtggggtgtttattcctgtgatcccacatttaagtcctacaatgttgtgttggatattctagttgacggagattgccccagggtggcacctaatgttttctatgacatgttgagtagaggtgtttctccaactgtgtacacgtttggggtggtcatgaaagccttgtgtatggttaatgaggttgattcggcttgctcacttctcaaggacatggtgaagcacgggtgtgttccgaattcggtcatttaccagaacctgatccatgctctttgtgaaaacaacagagtgagtgaagcgattcggcttttggaggacatgtttctgatgtgctgtgagcctgatgttcagacattcaatgatgtcatccatggactctgcagggctggtcggattcacgaggcagcaaagttgcttgatcgaatgctacttcgaggtttcagcactgatgctttaacgtatggatatttaatgcatgggttgtgcagaatggggcaagttgatgaagcaagggcgttgctgaacaaaattcccaaccccaatactgtgctctataatacattaattagtggttatgttgctagtggaaggtttgaagaagccaaggatcttctgtacaataacatggtaattgcaggttacgagcctgatgcctacacgtttaacataatgatggatggactagtcaagaaagggcatttggtctctgctcttgaattcttctatgatatggtagcgaaaggctttgagccaaatgtgatcacatacacaatattgataaatggtttctgcaagcaaggacgattagaggaagctgctgatattgtgaatagcatgtcagcaaagggtatgagtctgaatacagtagggtacaattgcttgatttgtgcactgtgcaaggacgggaagattgaagaagctttacagatgtttggtgaaatgtcaagcaaaggatgtaaacctgacatttatacatttaattctttaataaatggactttgcaagaatgataagatggaagaggccttgagtttatatcatgacatgttcttggagggtgttattgccaacactgtaacatacaacacgttggttcatgcatttcttatgagagattcagttcaacaagcatttaagcttgttgatgaaatgatatttagagggtgtcctctcgacaatattacatataatggccttatcaaagctctctgtaaaactggggcagttgaaaaaggattgggattgtttgaagaaatgcttgggaaaggggtttttcctactattgtctcttgcaatatactgatcagtggcttgtgtagaattgggaaagtaaatgacgctctaaaatttcttcgggatatgattcatcgtggtttgactccagatatagtcacttataacagcctgatcaatggtctttgcaagatgggtcatgttcaagaggcagcaaacctttttaacaggttacagagtgaaggaattcgtcctgatgctatttcatataacacactgatcagtaggcactgtcatgagggtatgtttaatgatgcgtgcctgcttttatataaaggcatagataatgggttcattcctaatgaagtcacttggttgatactgataaattatcttgtgaaaaaaataccacggggagcaagaatttctaaggattttatggtggaatttggagtttcttttccttgaagccaacttattctttccagtcttgatcttatttgatttgtctgttggcattctgattatgagctaatgttggctaagaattttggtccatttgctatgctcatgggaaattgggactccaacattgtgaattgtttttaagatttgtggattgttattgctggttggacttggagtttacacaagtgcagaatggggaaagactattttgagttatatcatcaaactggtcaaagttttctgtagttgaagcataaatatgtatatatccgtagagagaaagataggtgtggctggttccactgctcgttaagaggtaaccaactattgccttgccatgttgaactgtctcccctcagattgattgatatgatttttaaaaaaaaaaaaaaactatgacatgtttgttgtttgtcctcatctccttctctggttacttggttggcttgatatgattgtgaaactgagcttttagacataatggtggctttggttttagttttgttttttttctgtatttgtagcttgtgcttatgttgcagttggtttgagctttggtgttttttgttgtaggaacaattcctggttggggtggataagaaatcacagggttggtgattggttgttcccctgaaatggcttgaattataacggccaagggaactggtgtgatagaaggaactgtcagatgaactggtgggggaaattgacagaattggcggaaggaactgtgataatggttggtgtatctggaggtttcatgactggtgtaggtgggcttgaatttgcaaggaaaactgtggtaggtgagttgtttggagatcttgctttgtggaagaatggggcaccaaccgatgatgaggagagggtgttactagaaaataggaaatttgagtaaaacagagtcaaagacagcattccacaatgcagaacatggacgtcgttgtaatataccataccactatatcaataattagtttgattttactccgatataaaggtaagcacactgacataaaagaaagagaagggttgctgtgaactcagtgatttgtgagctcttctgtgtctccttatctcttctgtctgtcagtatctctttaaaaaaaaactcgttgcttttatctttacacacaagtatgtcatgtttaacaaagaaattttacccttactcagagtcagttatgatttgtttagtcgttaatgatgatatggcattaatttaattgctattttattacattttgtggcgcatcacaaagatccaacataatccccaaatcaacaaccctttctcctttcttctttgccactcccaatttctctatgtctacactgaaaatgaactcaagttgatgctcctccttaattctatttttttcctgctttgttgtcctctttaaccaacgttctatccttttcctgaacctgacaaaggctctgcagttgtttttttttaataactcttcccaaggtcaaagaaaaaacgaatcaaaatattttattgtttaggttatggcaaattgataatatatatgtactacacaaacaacaaaatcttttgatttattttttctttgaccttcagaagagttattcaaaataagcgatgatagagttctcgtgaagttcagggaagggaaagaatgtggttgaagaagacaaaaagcagaaaaagaaattagaactaaggaggagttgcaaattgagtccatgctcaatgtaagcattgtgaaattgggagtgatagagaaaataaggttgttgatttgaggaatttttatttatttatttgggaattgtgtataatctttgtgtttttattggggaaaaaatgtgatcaaggggaaagatcactaaaagtgtctagtcaaagtcaagtgtttaagcaaaaatcagtcactaattaagccaatgaatacttcgtatttgtaatatggtgacccaaaataatcattgataaacgatctagcatgtggatcaattgatatatagttgttctaccttaattatggtcttaagtttgagtttgtcttaaatacttgaagagnnnnnnnnnnnnnnnnnnnnnnnnnnnnnnnnnnnnnnnnnnnnnnnnnnnnnnnnnnnnnnnnnnnnnnnnnnnnnnnnnnnnnnnnnnnnnnnnnnnnnnnnnnnnnnnnnnnnnnnnnnnnnnnnnnnnnnnnnnnnnnnnnnnnnnnnnnnnnnnnnnnnnnnnnnnnnnnnnnnnnnnnnnnnnnnnnnnnnnnnnnnnnnnnnnnnnnnnnnnnnnnnnnnnnnnnnnnnnnnnnnnnnnnnnnnnnnnnnnnnnnnnnnnnnnnnnnnnnnnnnnnnnnnnnnnnnnnnnnnnnnnnnnnnnnnnnnnnnnnnnnnnnnnnnnnnnnnnnnnnnnnnnnnnnnnnnnnnnnnnnnnnnnnnnnnnnnnnnnnnnnnnnnnnnnnnnnnnnnnnnnnnnnnnnnnnnnnnnnnnnnnnnnnnnnnnnnnnnnnnnnnnnnnnnnnnnnnnnnnnnnnnnnnnnnnnnnnnnnnnnnnnnnnnnnnnnnnnnnnnnnnnnnnnnnnnnnnnnnnnnnnnnnnnnnnnnnnnnnnnnnnnnnnnnnnnnnnnnnnnnnnnnnnnnnnnnnnnnnnnnnnnnnnnnnnnnnnnnnnnnnnnnnnnnnnnnnnnnnnnnnnnnnnnnnnnnnnnnnnnnnnnnnnnnnnnnnnnnnnnnnnnnnnnnnnnnnnnnnnnnnnnnnnnnnnnnnnnnnnnnnnnnnnnnnnnnnnnnnnnnnnnnnnnnatgtatattaatagttataactttttcaaatcttaattaatataatcaatacaaatatgaaataaccaatttaatatatttttttatttatgcacaacaatttaattaaataaatgttagaagatctatctaatatgttaattaatgaatgttatgacaataaatttattttaaaaatttcaatggtactttatttgaccgaaaaagaggcttatggcattccactcaataataaaatcaatataagatggtaaatactcaaaattttttgggactcgatgaaacttaaacgcccttgcaaaagcgacttggttgactatctcttgataaaacaaaaaccataacgttttgacagaatctaagtaaggttatacaaattgtcacaatagaaacaaatttaagattgttatgagatagaacatcaactaattgcttgtaatctaattcaatattcacatttagtgacttcataaaatcaatccacttaagaataagtagaagtgcagtagcctatgaaaaaatggtccttatctctaaacccatgattattccaaacatttattttatcagcattttcaaattgtcatctaaaatcttcattgacgatagcctgtgaaacatgaatgctacactaaattaaactttataaatttgatttgacttgcaatagatttaatgacttctaaacaatcaattagataagttttataaaaaaaaatccggattaaataagtttttatccattttcaatccactcaaattaatgaatattttttctattttttttaatttctttcaatttaatatagtattttgactgttattgttatattaactcttacaaagcttaattaatataatcaatacaaatatcgaacggtcaatataatctcatcatcataaattatagtgattttatttactcagtcacaacaatttaattaaataaatcctaaaagacatatctagcatgttaattaactaatattatgataaaaaacacactaaatatttttaggataaaggatcaaactataaaaaaataaaggactaaatatgttatttttttttaaaaattgtaacccaaaaatcacactatggtgagggaattcaacccttcgtttcgaattcaacactgtaagtggcgctgccttctgttctgttgctatggggtttagggtttactccgttacggtcgtcactgactcttcttccatctcgtgaagcgaatctgttactcattcactgcattgcgaataacatggcattgtcaacgaatcgagatcagactcccaaatctgactccacaaacccctgctgtgaactcgtaaaaaacctctctctctttcactcacttccattttctttttccacttcactttttgattttaatcattaatgtgttctctttctcttatttctcatacgcagtggaagaagaaatacttgaagactcaagaatcgcggaatgctctgcgacaagccgtcaaggttcttgaacaaaaaattaacgaaatccagtcccgatacaacaaaggtaactaactctttattctttttttttttttttttaaagttttggtgtattatataatgaatatttggttttgttcgcagtatgcgtatgcaattggtttagttgagtgaataatgaatatgctagtaatgtgattgatttgatgttattctctgcagtatgtggggtcaaagtggaaagagaggaaaaattgggagaatttgttgctgctagggcacctttagagagtgaaacttgcagcttggagtctcagattggtactcccataacacagctgggacgtggcggtggtggaaatgagaatgggaccttacaagctgattgggaaaaggaaattggtagattgaaggagcttatagaagtggagaagggaagggctgattctgagaggaagaaggctgctgaagcttgcaagttactagagaatgagaagaataaggttgttgaaaaggaaaaggaagtcggtggattgaagaggcttatagaagtcgagaagggaagggctgattctgagaggaagaaggctgctgaagcttgcaagttactagagaaagagaagaataaggttgttgaaaaggaaaaggaaattggtggattgaagaggcttatagaggcagagaagagaagggctgattctgagagcaagaaagctgctgaagcttgcaagatggtaggggatgagaagaataaggctgcggaaaaggagaaggaaatgagtagattgaaggagcttatagaggtggagaagagaaaggatgattctgaggggaaggaagacactgatgtttgcaagttacttggagaagagaagaaaaaggttgctgaaaaggaaaaggaaattggtagattgaaggggcttatagaggagaggaaaagaagggttgattctgagaggaagaaagctgctgaagcttgcaagtcactagaagaagagaagaaaaaggctgctgtaaagggggagattgccagaattgaagcggagaaggcagtgaagtatagttttcaaattgatcaattggagaaacaggtaaacgaagcaaaaacaaaattggcgtatgagatttctacgtatagagaggcaaccaaaaagtttgaagctgaaaagcgtaaactattagcagagaaaataaatgctgagtcagggatggcaaaagcaaatgaaaggttagaggttgaaaaacaaaaggtcgatgaggaaaaaaggcgtgcagatgcagagatggttaaattaaaggagcagaaggcacttgctgaggataactggaacaagttcatgaaagaaaaatgtcttgctgatcagatgtctcagcagttagaagaggataagcagatgattgaggatttgaaacggaagatccatgaactctcgtccttgactaaacctgttgaaatggctgctgacagcaaggtcaatgctgaaagtacagaagtgaagcttttaaaaaacaaacttaagcttgaaaagctaagagcaaaacataccaggcaaaaatataagttagaagcaagtcgttacggtattttacgtcacgatttaggtcgtctaaagatggatttcattcaatttctacaacgccttgatatactggatgcatccttttcaccgcatggccaaacaaaggttggtttcactgataaattgtttgtagtcatataatgtttgagtatttttgtcattttttatctcctctccctgttgaaatcatgcacacttttgaagccaatgatctcattctggcttactctcatatgcagattaaaagtgagactacttatgttatggacaagtggttatgaacttgttggttggttgtcccctaaattattgctatctttgggtttatcatcatattagctgtagcactaacagtttatttaaccttgggaaatgggaattttcaggatcccctgaaagcaatacataaattatttgggtggttttattatatatcagcactaagtaattgtttagtagttatatatagtacttggttttagttttatctttttgggggtgggggagaggaaggaattaaagatttttttgtttgcgagaggccttggttttaggtcagagttcatataattaaatatatttttcaatttattttttttgtttctctttttattgtatgttattcttgtgtatgcacaacttaactatttttttttttatctttgttgaatgattggtttgcagtttgagaatacactagatatgcagaattcaaatgtcatgagacaaatttgcaatctaaatttatctgagacacgtcgccagtttgagaatgagcttctggaaccctgctgcacaacaattgaggcaagtgatccattgagggaaaacatgaagaacactcaactcctcactccaggtagaaattactctgaaaaatctatcacaggtattggttctaaattggagcctcttgttagaggatctgacagaacaaagttacagagttctgcagtaaattccagtacagaatctttttctgatggacagttgatgggctcacaggatgcaaccattttcccagttactgcatcagcaaaattgactcaggacttcaagccatctgacaaatctgttgatgtgcaccacaggaagaggaaaagaacgcaggacacagttgaatataatgcaaatttatcttctgagaaactctctgatttgcatggtttgatgcatagaaaagttgtcaaatgcttagacggagaaaaagaggtgcttcataatctgaataatttacaggaagagaataaaagggcccacaaaaagagaaagaaatatcgtagggaaaaagtggacatgattcctttggttaacagggatgagcaaaagggcacagaagaggccgacactgaggtctatgatgatgcaaatgtctgtggacacacttcctgccctgctccacatactttagaaacctctcaagcatatgggaataggatatgtgatgctgtgaataatttcaattcgatagttaattttgatactgtgcctgatggaaattatatgaaattattagaattagaagatgctacaagtgaggaatgctatagaaaagcaatggattttcccatttctccatctcttcctgaaattgaatttcgtgaaacatttgaagagggtaatttgacgaatatctctctagaggaagcactccaagatgacatgttgagctcaagaacagacctgtttacttcaccttaccttgatgtaattaatgttgaaatcaattctaacgaacaaaaatgtgatgattatggagtttcttgtaatttacatatgcactctacagaaaagtcaaggactgctttttcggtggaggatggaattggatctttaaacaatcaacttcctgaattttgtgttgtcttttcaagtattgaggacaatagtatcatatctacgatacttgttgctacaaaaaattgtatagctcggtgcaatttggctactcaaacaggctggggggttagtaacattctgactgtacttaaaatggaagaaaagctctcacagaagtaagtgtctcacattttgtgatagtatagggtcaatgctgttgaacaccctttatagtttttgtttcaatattttgcttttcttgtaataacaaacaaatcagttcatgataatatttaactgtggacaaatggtggtgttgatattaattttattattttgtttcatctaatttctttcagggagaaggtttcggtgctgttaacacttatgctgttcaactttgccatgactgcatcaaagacatttggaaaactttgggatgggaatttattccactgcttgcaatcttattctgaacatatttgcacaggtttggtaatttgtttcataatcaacttccattttcggaacattaaaagaatgtttttaattatataataatattaatatcatgttatttaaatttgattttaatttgacaaaatttcacatctttttccccagttatgtctgttgcagagacaagaatcctgtttgtagagaattattctttgcgcgagctgcttagcctcattgaagattttcttattgagggaaaagtaatagtaaacagtagagtagatgctgaaactttgtcttgtgatttgagagccaatgattttctggattgtgttaatgaagtatcatccgatgtagcttcaagtgaacaattggcagcagcaagtattatattagcatcagtatgtgctgcaactgatcatgttggatttatttgtgatgcttcatatcatattcttcggtcatgcaagtgggattctctgatcgtgctgactattctccatatttttgcttatctgggtggagagaagttttttaacatggataattttggattaatggtgactgttttgaaatctctaattatgtttcttgaggatgagagcccatctgttgcatctgcttgtcttccttcaataaatcagctgcatgctgagttgtgtatgaatgttaaatgcccattctcggaaggtgctgaatccattgatgcagttgcatgtttgctcttggaagagataaagcgaataaatttgtcagattccagattaatgtcagacaattataatgctggacaatggtataatcaggatgcagttcaatgtgccattagcaagaactgtgatgtgccctgtttgaaaaaaggctcgatttctgctactcaaccagatgcccttatgaatgtcaacttttgtcgcctgaatgacgtcctgtcattggtggaactggttgcaaacaaaacggtattattctcattatttcaagttaatattgaccctgtcctataatttctttttatcaagttctaaaattaaagactagttctcctaaaataagtgacattatctttttttagaattgatgccatactgaaattaatagaattttacaatatgaaattggccatggtatagttcttgaaagtgatttcactcgtggtattcaccatcatttactgaaataagtgatttgttgccaaggcccaagtttttttatggttgagttatattgttctcaacttctcatactcgtggaataacttgtcactttattttgttgatgtcatcataatcaaacctgattacatgtttccttttcctaatacagagctggcactgggctgatatgaaacttgttcctcagcttctgaatatactcgactcatgtgcagaggagaactttgctgttcgtataattgttcttcttggtcaacttgggaggtaaattgatcactgcttcttggatattgctagtatcatgaccacattcactgcatatgtttgtaactttgtatcgatagaggatatatgtatgcttatcaagattaaaaatcacttactactaagatgagtatttagtcatcttaaggaaataatgatttttaattttttattgaattctaaatcccaattgctgtgctagtgtggtagaagccttaggctagggttaaaaaaataccaaaatgagtgatttccctggatatcgagagaataggactatccccactctctaagagtcttatcctttttcaaatgataagataatttctctctcaactcccctctttatttattggcaatatgccttatttcttctactgtctcagcctgcccaaataacataactaactccctcactaagggacacctaactactaagggacacctaagataatttatgtcacaacacattctgcttttttggtagcacctacgctcagaatctttgtatggtgatagtttcatttttctcattaacttttactgtacagctgtttctttgttgatcacatatctgtgaaaaagccatggtgccatggacacatgcagacttttaaatattatttgatttaacaaagaaagttgctttcacatatttttgcttgtgttataacaataacaaagtcataaatgacgttataaatttcaggactggagtagatgttggtggatatgaagataaaggagttggaaacctgagatgttatttgtatacttatttttgccgaacctcttccatgaaagcaggtctttctcttcaagttgccgcggccactgctctgtttggccttcttcctcttgattttgaaaccctttttcatactaaaatccatctttcagcatattctaaatctgtttctgacaatgctgaaactttgagaaagtggttctctgggctgggtaaagatcaacagaaattgctatctgatttatttagtaagtaattttttttgttactttcacatgaattaaaataggataccggagccagttgatttaattggcaacgctcttggagaagttttgtagattgagaatttttttaaaaaaaattagatggcgttgattcaatctttttgagagccttcaacatggcttgtaatcttgtatgctgttgtcgtgcttctgaaatttgtacattctttctttttttggctgtaaatttgtaaatttcttgttattatattttatagtgaaacttgttatccacctgcaagcgttattgtgatatcccccttcatggttttagacattcatcgtaggccattactacaggagaccacagtcataggtggggtccattttgaaccatcaatcttgaccattagattaatcttagtattgtaagtcatcccacaccaaatcccccacccagcaaccgctatttgctgtctccaacatcgcccatgatttattttgccacctggtgagatagagagacagagagagtgagagaacaacttctccattctcaatttaatggtcaggtcaatctgattaatggcatccttttgttagcatgttgtatcctttccagatttgaattacttccaatcatccctccaaatcgaccaccgtgcatcgctgaaattgtcccttttaaaaaagctgtggaggtcgattgacccaacgagacacaatgaattagatccaatttaacacatttttttgttggtttgcttcaaagagagatactagatttgtagatctgtcccaactaggcttgataaactttgcttttcttttagaaaattataacaataacaataacaagcattgtgcggtgcattttggggacacttaaaaaagcttggtccttttaagattgaaggcaccaaggctacattatgaacatgcaaaaactgttcatgggtgaagggggtcagtgagtgagtgtagtggcgagaaaaaaaatgtagtcgtcagaaatcgtttttggcagtggcgaattgtggttggtgtgagatggtctgcaatactaaatttaatctaatggtcaggattcatggtccataatgaacctcctatcaagtggtccaccctaaaattcaccttcatcctaatataatgaagcattcaaaattagaatacaagatcaaatagtcagttcaacaacgacaattggaaggaatactgaaacacatggatgatggcgatggtcattataatagtatgatttgaatccatctccaattttaaacattatttcttaggcagaagtagatttacgttcaagtcttgatttgagattaagcttaattttttgtaatatgcacgacttgataattattttaccttaccaagaacttcctaatatagaatgtagatattctattcaaataattatatatttgactagggatcaatttactaaacgagtaagttttctctatttcttatgaaatgcgaatcatgaatcatgtgataatatcacggtgatcgtgcatgtaacatcttagaaagtgaatattcatatacatgtaatcctatggtgaagatttacttatattttgaaaactgtattgtacattaattcaagttgactgatgaaatattaaatattttttaaattatataaaattttatctctctttgaactttttcgaaataacttaaatattgtataatgatttttttatatattatcattcaaccatgaatgaattattatatatgctcaatttgttaattttctatgataattattttaaaagttatatatagattttttttattggttaatagtataaaattttaactctcacaaaacaccatgcacgaaaattaaactcatgaaaaatataaatatatttgttattttatctgaaataaacgagggaaaatatctcttatttgagaaaaaaaataataatatttttgttactactatgtcataagttaatatcttggaagtttaaataatattaacttgttaaaataattcaatttttttattctgtaatatgtattagccagtgttaacacaattaatttgtttttggtaataacaatgcttacacatgcacaagcaaagactcagctcaggtaacattcatacattctattaacatgttggagtcacaagcattattataatacacccaatttttcctattaaatgaaaaagacaagaccctataacccacatggagaaaatgatgatggttgattgtcgaccaaaggtgacaattagtgaaaacaatgatgatatgattgctaaaagagaaataccaataaaatgtttacacattatttattattaactgaacattctgtaaattgtaaagagtttaataaatatattgttaagttgaaagtttttgcagcattgttgcttgcacttcttgtgaagcaattctgaccttatttatatactatcaatcaataaaaaaatatcctgtgtttaatacagatgatgatattaaaacttttagataatgatttttgattagacaataatgtaaaaaacttttatattttactaaaaaaaagttttttttttttttaaatgaatgatgctgttattcacttttctcatttcttaacagtcggtggaagacttttagtttagctgcttcacactaccgaaggtcattccttccccactttgaacagtaaacatttttactattttttgcggttcgcatatttttcaagtgacagcctactaatcattcaaaggtgtaaaaaattgaatttttattttcagcaacaactttttttttttttttgtacaaaatatatagataccatatgtgatatgtctataataaattaataactgaaggctgataaaaaagaaggttaataactgaaggtagttttatctacttgtctctatgtcaagaagcacgtgaaaacaactgaaaggtaccaacaaaacatgttggaaggttagctacataatcttcggtggagcaaatattccacttgtccacatgcatgcatatataattggttatttggaatgcctcattccatgcactgaaactagttgtgacacttgtattgcagtgcacataataaccatgggctctttggagcaccaacgtttgctacccaggcttgactcacactcacacattcaaaacttgtcatcagatgccattgaagaattcttggaacataggcctattgcattgagatggtggtcaaagcttgttgtgtgggagtcaaggcttctctggctcctctctggggcttctattgttgtgtccattttcaattatatgctaagttttgtgaccttgatgttcactggacatttggggtctctagagcttgctggagcatccgttgccagtgttggtattcagggtctagcttatggtattatggtatgcctctttatctgctgcgccacttaacacactcttttaaatacattttctattagataaaacttaaaatgcagttccataagtgctttaagtgttgttctttttcttttagataaaatttaatgcagttccataagtattgttgttctctaatcagattaaagtttcacttaattaatctgcattggtgatctagatcaatttttttctttctacacagttaaatttgattggaaattataaaatttggcaagtcgcactttctatttaaccgactcttcttatttaacgagtttcacttagttaagtgtagttttgaataaatttcaatcaaataacatataatatattaaaagaagtgtctcattttcaatcatgtgcatatttgtgatgattgcattttgcttaaatagctggggatggcaagtgcggtgcaaactgtgtgtggacaagcatatggggcaaaaaagcatggagcaatgagcatcatattgcaaagagcaatcatcttacacattggagcagcagtgattctctcatttctctattggttctctggggattttctaaaggccataggacagtcagatagcatagccgagcaaggccaagtgtttgcacgcggaattattcttcaactctatgcatttgcaataagctgtccaatgcagaggttcctccaagcacagaacattgtgaatcctcttgcatatatgtcagttggggtgttccttgttcacattcttctcagttggctagttatatatgttttgggatatggccttttaggggcagcccttactctcagcttttcttggtggcttcttgtcttgtttaatggtctctacatcaaatttagtccaagatgcaaggaaacctggacaggcttcagtattaaggctttcaaaggaatttggccttatttcaagctcacagtagcttctgctgtgatgttatggtatgactatatgtcgatgtcctcataattttctctacatgcatgcctagataaatgagtttaatttctttgtgccgtcaaacacagttaaaccaatcagaaatcactttagatataacttttaagtactgattattatatgtcaacaaacttattgcacatgacaatttgtaattggatgataatgtaaaaacgtcttacacagtaagtgcattactatttagtacatatttatttggatttcaattgagtgagctcaaaagtacttttgatcccaaatcattaaaaccttcattcttcattttgtgcattggaaatcacaaatgtgcatctcaaaattacttttccaacttttatccaaacataccctacataagtatacacatcacacaccacattattattcacatcaatttgttctactaatctaaaaatgtatcttaatgtagtttggaggtatggtacaatcagggactggtgcttttatcagggctgctctccaatcccacaatctcactggactccatttccatttggtatgttaatattttttcttggaataatttttcttgttatgtgccaacgtgttgcctaaccataatatctttatcctgatgtgctttcagtatgaattacttgaactgggacatgcaatttatgttaggccttagtacagcagccaggtttgcaacaaaacgatgtgtttttcattcaagcaactttctcaaaagcatgctaatggtagtttccatgattgcagtgtccgagtcagcaacgaattaggagcatcacatccaagagtagcaaaattttctgtcttcgtagtgaatggaaccagcatcctcattagtgtggttttctgcacaattatcttgatattccgggtttctttgagcaaacttttcacttctgactctgacgtcattgatgctgtgtctaatttgactcccttgcttgctatttctgttttcttaaatggcattcaacctatattatcaggtaataaagctataaaaagtacactagcataagcaccaactttggtttatcacacttttgttaatttttcttggaaaatttcaggggtggcaattggaagtggatggcaagcagtagtggcttatgtaaacttggcttcttactatgttgttggtcttactgttggatgtgttcttggcttcaaaacttctctaggagttgctgtaagtttggaacatctctgtcactaatttttaagtttgtaactgattagtttcatgcaatgcattttgtggtattgttttagggaatttggtggggaatgatccttggagttcttatacaaacagtaactctaataattctgactgccagaacaaattggcaagcagaggtaatcaaaactctacatcagaagatcttatacatgttatattacatcaattttttgtcacatgtgaggtggtgaaccaattcttaatgcctttgaaggttgaaaaagctgttgttcgcatcaataaatccgctgaaaatgacaccttagatcaactggttgctgacacttagaggcattcgtcttttttcttcaggcttggctgaaatgcattttagctgcataggaatcttgttttggactaaaggaatgttgttgatgggtttcttcaccctatttaattttatgttttgttcacaattttgagaatctaataatgaaacctaactttcactgccagcataagtaattgacatattattgcgtggttggatatgtgtttatacagtttattctaactaaacatgactttgcagtaatatgatttttgttttgataacagatattagaaaattaatttgacacacaatgttatttgaaaatttgtaatcaaaattgatttggaacgtaattaccaaaatttcttgagtctaactaaggatatgcatgtaacaaataacatgacaagggtatacatgaacaaataacacaactctagttagttttgacaaaaaggcctcatttcataacttcaaagagacttgagtctaaaacttataattcatgtttctaatataataccaaacatcatgatcaatgaaaaaattatttgactcattttaacctcaaacttagacatgttaaatgtggatccaaatacacattagtcgtaattatttacaaaattatgagttttctttctaatataatgagtatcaaccataattttgtattttttttaataaattttaattaataattaaaagtatattaaaagaatgtgttataaacactaatctaattttaaaaaaataaaagtaagaaataaaaagtaatatttttatgaaaaattaatttgctcttaacactattttactatgatttttaataaaaaatcatttttatttattaagttatttatttatttagtataggtcgcatcaagagagcagcagaaaatgagacgttggatagatcaactggctatcaacaaataagaggaattaagaaataatagtaatacactgtaacatttttttaacacactcttgtactcttttaaacaaactattcattatcattaactgaaattgattcaaatttataaaagtttgcatgtcaaactttatttaataagtcttacgattttataaatttcaataaattttaactaataaaatatatatatattaaaaatgtgttaaaaatgtattagaaaatgttattacttactaatattccttttatcttatatttttcagacatggtttaaaaagcattctagctgcggattaatcttgtattaggcctaatgcagaatgaaatgtaaatgcatggttgagaaaataatgtacaaataattcctttcggcttatgccccgtataaaatgagtgaaatgaattgtaatgttagttaaattagcctaccataccaaccaaatccatgcattcaaattgaaatgcccgaaaaaggaattaaaaattggagataagttagatgataaaatggcattattattggctaaatccgatcatgaattaaactaaaatacaaattccttaaacccattttatgttagttttacctatctctaattatctttctttttcaaatatacatcaacttcattaaacagcgacagaatcagtatatcaccaagaattaaacaccaagccaaaccttcaacccagaattgtgcccattgtcaacttgtgggcaaatttagtacctttcctaggaacaaagttcaaaatacattcatcaaacaatggcagtgctaatcttatgccctcataaataacacctagttcagaccaatctgttacatttctattaatatcacctacctttttgcaatcactttcgatgataatggaactccaatcattgtgagcagaaaacttcacaccatcgatgagttccgtatgataaatatactgttctggatgaattgaggcacgaaacatacatccatgtatatatcctactgttctaccggtctacttacaatcattgtgcaaagttcttcaacgataaaataagtcctaaatacggtagagcttaaaaacaacaaagaaaacaccaatgcgttaccatattattagcaactataactaaaagtgagtgcgtgtcattccaaattacgcatttctgcgttattaatgagattattcatactctaggagtcacagcacctcccagctactcaagttcaacacaacatttgacagtggatgccacccggaagggggatgcataaagcctcctgagattacaaacgagagatctggagtggtatcactgaagcatcctctcccattaccggcgggaccaaatctagctccccataacgctccaggacacgcatcctgcagtcctcagcagccatcattccagtagagtatgccccatgcacagatcccgtatacaacatacttgttgcttcccctgcaaagaataaattatctacagggacccgtagcctctcatacaggtcatgtggtttcccaactgcatcatagctataggaacctagtgtattaatatctataccccatcgagacacaagatactgaatctgcatgattgaaacaaattacatcttcaaaacaccaacaacatactagtcactgaaaaacaacttattcaattcaaccgtatagcaattgtcaaagaatatatgtaccggaactaaactgagtaaaacttaggggtctgcaatatataaatatggattgaagcatttacttttcttgcatagtaaaaaagtgaaataaatcatcaaaattatcatggttaccggtgaagaagcgtctggtaggatctttttgagctgcgtgaaagcaaagttagcagctgcttcattagacattttctcaatgtctttggccagctgcccagcaggcatgtaaacaaggacaggacgacccgtagccttgtggagattaagaaagtagctgcatccataagatgtctctgcaactactcctaggaattccacattaggccagaaaacatttttaaagtgtaaaattattttattctcaatcccaaccccaatatcagaaatggcagcttctttccagtctggtagctttggctcaaattttatccaagatgccttcagcaccccaagaggtacagcaacaatagcagcgtctgcaacaaatgttttcccattttccactgtcacctttacttcattatattgcctaactatttttgttaccctgagaagaggtattatgaatgccattaaatttagttaagcaacacaacgggggaagcagatttccaaaaccaaactttaaattaatatatacctgtgtcccaggcgaatatcaagacccttggctagggtatttataacaggctggtaacccctgaccataagaccgtgaccaccggggagtaatacttcctgtatgcagataaacagagaagaataagtaatacacgaaaaatgttgatggatgcatgtagtaattaacaataaagtagcaacataatgtgactatgatcaccatatgaagccacttctctatctcatattgcatcctttgcatctaatatggcggcacacattaccatttaatctcaaactcaaacctatagggcataactatgagtttgcaactttacgagcaacattgtattcaattataagtatatacaagaacaaaaacaacaacgataaatagctgaaaaagaaaaagtttcccattcacatcagcccactagtactacctattaatgatttgtcatgcaattcaaatttcaatgacataaacttgaaatggatatatagataatagaacccaaacatctcaaacttggttttgtcaaattacctgatcccaacatttcagtgatatggtatcagcatctgtagcaaaccagccctccattctgcataaataccactgtagcaccttgtgggaaagcccttccaacctgcatccaacagagaaaattaaattatacattacttcagctctaagaaaatcaataatggtggtcaaaggattattttatgccaataatcacctcaattccggttttctttcaaaaacaattgaaagtgcacggagtatggacatatcttcactgaattcctctcgtacattatttgtctgcattaaagcagggtcaatctttagaggtgatgttcataataagtggagttgaacattaatagaatcaatcagaaaaaacaatgtattaataagcgaataatcaatcagataaaccaaataactagaaatattcaattactcgcctcttctaaaatcactccaaatattttaccaatttttgctactaactcttggggaacttgattcccatccatatcaaaaagtgcatagctgcaagaagttgatgaatttctataagaaaaaacttgtatctgataatatataccattcagtataagcaaaggataaattgaagcatacactaccgtcaccaattaattatggaagtacagcagaaatagatatctaatatcatttattataaaaaaaaaaaaaaaagagatacttttacctttccaaatcatggtcataaaggacagaattatcctcactagtacggtaaagaggtagtcccagcttcccaatcaatggagccagtggattctccttgcaaactccatgcaacctgaatcacagtcatccatttttaatactaaaacatggagaaatgcaacattcttgtcaacatgaagaaaaaaaagagaacaaagagagtaagctttaccacgatgcacccaggtcaacaggaaagccaaatgagtagtcagtgtgaattcggccaccaagtctttcccgtgattctagaagaataaccttacaaataaaaagtacaatttatgcaaataaataaattaacaagtacaaaagtatgtatgttcaagagggggaaacaaaaaactttaatacctgaaatgaggcatcttgaagtgcacgagcagcagcaatcccagccatgccacctccaatgacaataacagatggggacctctcctgctgcttgtcatcatttgcacagcaaaggcctacaaggaaggaggagagagggaatccaagtcaactttagcagatacacaaaaatagaatcaaaacttctgaaaaaagacaattctcagatacacgagctggcacaagaacatttcacttctaactttctgtttttataatttggaggatgacccaagagaatatttccctctacaaatcatacactcatcattctgttctgaacctacttttgagtgctgcacgtacttttagagaataatcctctttgtatctttcattctgaacacatttgaaacaacggtaatccaaacatacccaaagtcgtcatcctcacacctagattcgaagagattgcaatctaattcttccaatcactttcagaagctcgattgttagaccccaccagccaaaccatctatttcaaagttcaaattacgcaaaaacgcatgcacgtgttcacattactctttcattcgtactacataacgaatttgatcaaaatgcatcattattatatagaaaaacaaaactccatgcactggtatctataaaacgaaatcaatttaaactgaaactgtagacacattgaacaaaaaaggcacacaaaaaaaaaacagcgcggtggagaacaattaacaaacctctgcgtaattgcggattactcttgaatcgggactccatattgtgacgaaaaccggaaattacgattgagattggttttagcgttgatcaataacaagggttggagggaaaggagcgattggggtgaaaaatggagggtaaaaattaagaaagaagtaatgaagtgaaaggaattgaaattggagaataaacggagtttcccaaaccagctcatgcagctaatttttgcagagcccaaccactctcagctggatcggaacgcgaaggtaggggagagaggttggtcggggtttggtttccgagaaaattcagagaaggaaaaagaaaaggaaaagaaaattcactcattcatataattggagtgtgattgggaaagaaagtgcattgcaggttaggtttggtttttaatttatgggattgctgcttgcgttgtgccacccaaaccgacgaggatgccgaagccacgcgtcttacatctctttctttaaaacctaggcatgtaaatgggccaggccccctgttaggcttttggtcaagtgtatttaatgtctcatttgatttatttattataaatatgaggttaaaatttttaaaaaaatttatttaaataaaaaaggttatgttcaaacttaaaaaagtatgttaaatttattatattgatctatttaatatatatattaaaatttaaaaataatatatttatttttttaaaaaatattttttttattataaagatggagaatgatcaattactttaaaaattattttaaaaatttcataaaataattattaattatttgaaaatataaataaaaaatattttctgtttaaaatttgtttttttaatttttttaaattgatttaaaatattttgtaaaattaatttttttattaaaataaattttttaatagatttgtacatcaaattaaatttttaaataattcaaatcaaacttaaaaaaattataataaataaatagatgatatcaaattttatattttaatttaggtatttttcaccccctttacgcgactttgtaactcaatcataaggcttcaaaaagatctttcatgattgtacaattttggcattttaaaatattttattcaacatctgggtgttcacgtcttcaatttttttatattaaacttaaattattgacgtgacattcacatggtattatgtgataaatgtcatagtttcacatattagttatgtgtccaactaactaaccatgttgatacgttagtgttaatatattatgttaataatttttattgaaaaattaacgacaaaataatgatatacttaaattcttaaattttgaaaacactaaaattaatgctatgttttttttttatcattcaaattgcaataacattaattttaatgtagttcaccgcataagtaataaaggagttgtttttcaaaacgtctatggaagacaagaagaaaaaaaatacactaatgatatgtttggttgtgaaaaataaaataaaaaggaaagaaatttataaaattttgtgtaaatctcacatatttttttctatttaaatttttaattctctgtcattcttttttcttctttccaacgaaatcaaccataaatatggaaattaaaagtggatttaagtcatttagttaaaagtctttcaataaaattttcacttttggatggggtcaaaatttggagatacctcgaatctcatcagagagacaacattcctaataatgatagttaaaaaaatgtttcaaaaattttttcaccttttaaaaaagtaatttagtaaaaaatcagaaaaattattttaagaaataacatatgaaaaaatcaaaacatttaattgaattattttaaatccaacttatatataagaatcaatctttatgagaatacttgcttgtgtgaaaaaactttaataattttcataagggtatttttgttttaaaaaaagaatttaaagttgaaggtaaacttggaaatcaggggtgcaagaataccaagtcccattagatgattatgtatcatagttagaagtgagcccaaaagacttggtcaatgatcaccaactatttatttctttgacaaatgctgaccaagtatctttgagtattgattaaaaaattaaaaagagaaaaaatttattgaaacacataaaattatattatttataacttttttatgttctcttgtgatttatacaataaatatttattcttttttagtttcttaacaaatatacacagattagaaagaccctttttttaatactccttttagactcaaatataagaagaaaaaaattcatattaactaagaaagttagttactcataattatttgtaccaatttcaattaaaaaaatattttctaatttattcttcattgaaatttggtaccagaaatttttttaaaaaaaaagtcataaaagcctaatacatcaattaaatgaagagtattttaaaaatgataacaattaattaggaaaaatatagttggaattttcttatatttaagaaaaaaaaatattttattcattatatttaaaaccggaagaattattattttttattcaacggtgcatccccgaacacttactattcaatatacaaggcttgaagtaaaacgattaggcccaattgcagatagtggctctgcagttttgagcttcttaattatattttgggaggataaaccgaaaaaagtaaacccattgggtttctctcttgaataatttagcaaacccctgatatatagaaggaaactaccatggtttatggatttgttggatacacacaatcttcaccttctagatccaatgtttacactcacgcatgatttaacttaactaaagaaaattatccaattagaaaacaaacacagtaaaaactaattcatactaaattaaaaacttagttatttatattcaattgagtaaaatgtatgagtattgcaaatttttgatatcgtctttaatttctataaataaaataaataaatgatataattgtaaacaactaattgttggtgaaaaaatgccaccatattactacatccataagtaattattaatccattgcatttcataaattttgtaatctttgtttccttatattcaatgtatattttactataagcaacatgattcacgagatataaatccttaatttcttcaatgatactactataatttattattttcctcatgctgaaaatgagaaggtaataaatgatgtgattgttgcattaggtgagttatacttgtatgacaatatttggaaagtatatatttgcatgtcctaaaacgttcatgatgaagataaaagatgtgaaagcaaaatgtatgttaattagttgacaccttgaaaaagtgcgataagtgcaaatataatagatgatataatataataataagaaaagataaatagaataaaatatttatctgaaataatcttaatttaagacaattaattatcttcatgctgtgtcgagtcattgggacagattttggcgtttggcacgtaaagactgaaaaagacaacagatgtactgcaaatgaggtggccatgttttacccactctgtggttgtgtcggaaactgacatctgctaactaattattcaacttcaaggctccgacatgtgtgtgtgtatatatatatatatataataataataataataataataataataataataataataataagaatgaaggttcatcaacaaaatttgtgagcaaggaggtataccccacagttccttgaccaatcggcaaccagccaaccactcaaatccattaaacatcaaaatatatgcagccaaaattaccgacatcacattttttgtttgcagctagctgaataccaatgtctactaatgatatgtttggaacagagaatcgagagagaaatgagaaaaaaatacatttttttcatttcagataaataattttttatttggttatcttttctcaaccttccattattattttcttatattatataattctcctaatttatgaataagagacttggggtgacttttactttgttctttatttttctctcttgattaatttttaacgattaagatatataatttgtaatgattttttttttattgtagaagagaataaaataatacttttaaaaaaatggaggaactaaatttaaaggataaaaaataaaagtagcctgaatttaagaaaataaaaacatatttatttatttatttaaaaataatataattaccatttatttacttacacattcatcattatatttaaattaattaaggatataaaaattattnnnnnnnnnnnnnnnnnnnnnnnnnnnnnnnnnnnnnnnnnnnnnnnnnnnnnnnnnnnnnnnnnnnnnnnnnnnnnnnnnnnnnnnnnnnnnnnnnnnnnnnnnnnnnnnnnnnnnnnnnnnnnnnnnnnnnnnnnnnnnnnnnnnnnnnnnnnnnnnnnnnnnnnnnnnnnnnnnnnnnnnnnnnnnnnnnnnnnnnnnnnnnnnnnnnnnnnnnnnnnnnnnnnnnnnnnnnnnnnnnnnnnnnnnnnnnnnnnnnnnnnnnnnnnnnnnnnnnnnnnnnnnnnnnnnnnnnnnnnnnnnnnnnnnnnnnnnnnnnnnnnnnnnnnnnnnnnnnnnnnnnnnnnnnnnnnnnnnnnnnnnnnnnnnnnnnnnnnnnnnnnnnnnnnnnnnnnnnnnnnnnnnnnnnnnnnnnnnnnnnnnnnnnnnnnnnnnnnnnnnnnnnnnnnnnnnnnnnnnnnnnnnnnnnnnnnnnnnnnnnnnnnnnnnnnnnnnnnnnnnnnnnnnnnnnnnnnnnnnnnnnnnnnnnnnnnnnnnnnnnnnnnnnnnnnnnnnnnnnnnnnnnnnnnnnnnnnnnnnnnnnnnnnnnnnnnnnnnnnnnnnnnnnnnnnnnnnnnnnnnnnnnnnnnnnnnngttagttatagtgaggtaaatagttatttttgtttctgaatgtgtagaacgctaataaatttatttctaaaagatgaaaattcaaattttagtcctaaaaagtgaaaaaatgtgacaaattcattcatttattaactttcatctgttatcattaatgaaaaagtctcatacgtggtataaatggatgaaaatgtcacaaaaataactgtcaacatggttgttgaatatatttgatcaaaatgtcaataaatttccaatagaccaaaatatcaataagttttcattggactaatttgtcaaatcccaaaatttgttacatttaagagtaaaatataatttaatcttcatcttcctcccccttttttattcattgaaaacataacattacaataaacacttaaaaaaataggaaaacaaacataagttagaacaaacataataataaacataatacgtctattgctatgaaatttctaatgtgacattattttacccaaaatatgagactcaaacaataatgcacaaccattaagttaatccttaaaaaaaatgagctccaacttgattttgtcattatctaatattgtcacaatagaaatttcaaagcaacagacagattatgcttattaatcaatattatgtttgttctaatttatgttcactttcttattttttttaagtgttttattgtaatgttatgcttgtaatgataaaaaaagagaaaagatgaagattaaattatattttattattaaatgaaacaaaatttggggtccgacaaattagtccaatgaaaatttactgatattttggttcaatctatttaacagtcatattaacaatcattttgtgacattttgtctctttgtgtcacataagttctttaattaacgataatgagcaaaagttaacggataaacgaatttgtcgcatttttttttattttcaaggactaaaatttaaatttttttattttttatcaataaatttgtcatcattttatatattcaacaacaaaaataactatttactcattatttatttttagtaataattatgttttgactttttgacctattaagaagtcatccatcccgattgcttcgacagcgaaactataaataaagagaaagaaagccaataattagagccttctattttttattttttttacatcgctattagtggcagttagttgattaatttagctatgtaatgtgacaatatgaatattccagcgattattcgagataatgactcctaagttcaatttgtgggtataaattaacaccataatgaaactaatattttcaccaaataattggtaaataaagtttgtgagagttgatacatatcaatctttttccaacatgcaacttcaagaaagagataggtgtgtgggaaaagtgaagagaggtatatagaggaagaagctagtccacatacgacgaagttggatggcacgaattaatcattcacctatctattaatattaatattataattactaggggaatagagtccgtgcctctctaaaaaatttaaataacaaaaaaattggaattaaatataattaataaaaaaatgatagaataaaaatatataaaaataatgggatattaacgtaagttaagagaaaaaattataatttaagaattagtttaaaggtaaaattgtacaataaaaatgaataataattagtaaatgattccctaattttgattagtggataaattttaatcagcataactaaagaagattaattattgtcactatattaatatctatactaatagatagaagagatattcactgtgtaactgcttttggtctccacattttttacactattttaccccttaactaaaaacaaaaatcaaataatcacccattaaccactcacatttttccactttgacaccattttattattcatttatatattaacattaatattaattaggctctctcacccttcatttcaattattattagattctgcctccattctttttttttttttttctctctacgccttcttcttcacttcctccttagtgtttgttacttcaatttagtgatttgttctttctggattcaattgaggaaaaaaccgcatggtttgagcaatggatgttaaagttgcacaaggttacaactttcagtggtggttcaactcgaaaggattggaagaagaccacctaacatatgttgtttgggtgtgtcttgggaaccacaaagcttttgggtttttattttgttaacgatgatgcgtcgcaaaagaaccgctttggaggtttcatgttcttacgacaacatttcagatttccattctaaccaataatcccatcatgtttatatatatatatatatatatattaatttttccactgctggtgttgttgaagtgtcattttgcttctatttttatttatttattatttaattttggcgaaagaattgttagttctgagctatatgtctttcaaacaaaatgaaggattggtaattgcatgcgctaagaaggtataatgaagtaatgaatcatactttgtgtaattttgtgtttttcttttctcactccacaataatttttctgtaacctttttttatctactttttttctttctcttctccttctttaactttatctttcatgtatagttcttttaagtataaatttggtttacataatgtttacatattcattttgataacatttggaaggatggaattaaacatgacacacaacacacaacacacaaaaaaatatggttataattcatgcaacattacattattgtcttgcatgcaaagcattcaaagtcttcttcttgatcttttttttttatttagaaaataaaccgaaattgattaattgtttgaatttatgtaagttattaaaacannnnnnnnnnaaatatttttaatcatcaatcaaataaattttacttattcctataaaatataattttcatgaatcatgattttcgaacataaaaagaatttcttccttatcaaatgccggttaagtttaacatgtaaaacatattgtttttatttttatccttaatgttgtaaggcatagaaactatttgaaagatgcgtctgatccattttttaaagatattttataaattatttaaaaataaagtataaactatttaacaatttttagtttccttgaaaaaacaattttcttgtttcctttttaagtttaaaagatattataaagagaaagaagagaacgtatcagataaaacagaaagtagagacaagaaaagagaaaaaaaaagcaagagaaagaaaggagagagagaacatgaaaatagaataaaaataaacttttgttttgttaaaagtgctttcacttaagtttctttattattttttattttaaaatgtaattaaacaagcaaatttctttttaaaaaggaataaaaatccaaaaaagttggaagtatctagtgcccttacctgctttgccactaacaagatcatcaatattagctgttcccctcatgggtccgctgctattattgcctggtgcaatcattgtttgactatgttgcactgcttgggaaccatatctgaacacattcataggctgcaagataaaaccaaaaaaaataaaattaactaacaatggtgattaaaatataaaaaacgttcatataaagtttaaaagtttattggtcatgtgtaatgacagtataacatctcatcacaaatgtacttttaaaactatcaaatttataattagataataatataaaattattttactttattattattattattatccagatataacttttcttctaaaaaaataaaacaaaagaactaaaaaaataattggtgcacatgtaaatatcaaatgattaagtaaagcaaagaagaatgaaaaaatttcacttgaaagaacccaattaaattacctgagaggcacttcgcatgagatggtaacccatgtaacgtgcatattgttctggaaggcaagggttttgcatatggttttggtaattaacggcacccaaaacttgattttggcacattaaattctggtttggcatctgaggcacagacatggcttgaccatgtggtacatttggcaattgcatcgggttgggtgcacccattcccatacccatttgtgacatatagtgctgaattcctgggaacatcactggtgtcatgccaggccccatccacattacctatcaccaacaacaaaaaattgtcacatattactatagtgttagaatatatcatcacatgcatgcatgtgtatgtgtaagttgtacctgaagctgaaactgaagcgatttcaagtattcgattgcctcttctaacattgatgctttgtcagtctgcgcgtacaacccattgttattttacaccacccatgattgaatcttatgaaaaagtagaatcattctaaaaaaaaaaaaaaaaaagatgtagagtaataccacttttaaccttaccaatcatccgagtctacccaaagtaatattacatggtagaataataatacataaacacctatacagtatatctaatttaattatgctctttattttttgttttttctctctcatcaatagtattatttattatatttatacttttttctcttctatttctatccatctctagctgtctgttagcgtataaatgttcacgcatcgttttcggtctagatgcatgcatctctacagaaaaaagttaacgtagtgacaagtcaacaagcattatttgataacgaaccttgttactgttaggtatcagttgctgcaatgtcctcatcttctcattgatcctatctcttcttctctgcattagtaaaataaccccggtagtaagagttaattaagttgacacaacacaaatcacaaaattacaataaaaaaaccatgcgctcaccctttctgattgattatgcacttcagctgcacggttccttctggaagaccccgtccgctgagaagccttgtttccatcagctgatttaagttctgtggcctattacaaatgtagacacatctcatcagcctacaataatgccaacaacgaatctttttttgagttatcatgtcttctatgatagttttacttatgattagtcattatcagaaaacttgcattggctgatcatctttaccggacttcacttctaactactcattttctatttacaagactctaatatgagaccttactatgaaatccaaatctaattcttctcggactaatgtaatgttggtgcaacaagaaaatcttgttcttctaaatgagaatagttacatggatcacacatgtcattcaattcaatttttgactaaatcttccgaggccatcaggcaaaaagaaaaaagcaagcatgcattcatgaatgtaaatggaaagaggaagagcatgacctcactttgttcctcagatgcttcttcttctgtcccttttctcttttggcaatgatctcttgttgatagggaacaaattcttgcaataccagtactgcctgagccaccggaagatgaagtcacagttggttcaatcatctctgatttttctttgtcactactaggacaaattggtctctggacacaatctcttacagcttcaggctcagcagataaagtaatattattagtagtggcccaaacaccactgcttgaaaccctgcttacatcttgctcctgagggatgtgattgctgccactgtgacttgaaccacctgtgatcactgagtactctctagcctcactttgtgacaagttagcagtagtttttcccctaaactgtgtactgccagatgctgaagaaacattattaaggggtgttgaaaagtgaggaaaatttagaacctttggtgatgcaccaaagtcattgattttctgagatgaatcaggaacatgaaatcttggagcaggcataggaataggattcccttggattcgttgaacaaatgaggatttcatgttaggtggtagtggttttgaacttgaagtagtaggatgatggggggtactagaagcaaaaaaattggcaaacttgtcctcttccaattgcttgattggcttgtaagattcaaattcacaagttggtggtagttcagataaaaggtttgaacaaaaatcttgttccagtgggtcctcaagtgggaattggatccatggggtggcctgttcttgatccaagttgcttgagtttccatagggaccactagaccttaatgttgaatgatctgttttctgcacctgtctcaagttagatgaattccctagtggcttcctatgtgtttggttgtgcctcacaacttgcccattttgccataggagctctacaagttcttggtccggcctgtataattgaccacatagagaattataatcaagccaaagttaatagggacattatatatcctgctttgacaaagatagataacacacaccctatgagctttctttggttggtgagacatgcatcactctcaaaatcccaaccaggaatactgttcttcatggttcaccaaatcagttgtctgttggaacaagagaggagagagaactttagacttagagcagactttataagcagagtaaaatagaataatctgcaaagttcagctaattgagtaatcaaataagcatatagaatttttgaagtgaaagaaaaaaataataaagaaagaaagaaagctttcgggtcaagtgtatgcagcttgacttgccaagagggtgaaaaaccaatgaaatggaaccacaagttggattttgccattgtgatcaattgtgtgaataaataaagcaaggaatgtttaaactccaagagacccggaaaggaaaattattttcctattattacattacatttgaaagtacatgcaaatattgattaacaagaacagaaaaagaacaaaacactaaagaaatacaagaactgaaaaaaataccaaacttttaatcccaacaaagtgggaaaaaattgacagagttagttggagagctacactaagtattatctcaagaacatttaaacacatacacttcaaaaacaaagaagaaccccacctgagttaaggtaaaaagagtttttcttttggttaaggcaaaggctgcttttttgcaacttgttgaatagaagctataaaaatagatgctaactagagactgaagaaacaaaactccctctgaacaagtgctaggttcagcttgaggagtttggtgacagaggttgtggcacagtttttaacaagaagaaggacagtgacatatccaagttagtacaaagagagaagagagcaaatatggcatgaaaaaaatggtactaaatagtattgtgcttgtcaacagcgagaaaaacatggctagctgcacatgtggcttcagttgaaaccggggtctgcaaagattttgctgttcaatatgaaacgcaaacaaggaaaatccaattctccatgcacacggtggatgctatctgagagtgcattgtgatgacgtggcggggacaaggtgtatattattggagattgataaggctgaggcattgtctgaaaaagaaaggaaaaagatgtggtacaagtttcatgctcatctagacatcaactaatcaaaggcatcaactatctaccaaatatacaacctgtctcatgagtccatttttgtaacatggtcctagaagaatactggccaactcagaaattttcattattagttcaaacgagtggaaaggataatgcagaatctgaattctctcttgatcttaactagtatgacataataagagattttttttttttaaatatcataattacttgatgaatctattaattgtagtagtatttgataaaattgtatatatttttttaaacatgaccatatatcatgttacttatttttgtgtgtgtgtatgaacttgaatattttgtggctataagttagagaccaatctccgaatccattcaagagattttctatacacgtgaacatgagaatcgaatacttaatattgtaggtaatacaagatttttatatatgattcattatgtactagaaagtatcctttcatgagtgaaaataggataacattcaaagcaaatagcctttagaaattttggtgagccttgagttaagctcaaatcaaagtgtataacttgaactttgtactttggataatatcttgcatgtgaatgatgtaattattcggttttattgggtcgttagcatttctatcaaaaaaatctaaaataatgaaaaaaaatagtccgtctatgacaaaaaacgaaaactagcagacgaaagaaaaaattggtatttcaaagacggtatttagatatggaattatccgtctttgatttgtttgtctctagaactgtctctatattgtctagttattctcagggatggatttcggagatagaattggtccgtgacaataattttcgtctctaaatttgtctttgaatatgcattttgagttttttttttataaaaaaaataactaaaatattagagacaaaatcattaggtctctaagtttctcttatttatttattatcatttttaaccatttaattcattaaactcaaattttcttatgatttgtttgaaatatataatatttaaaggagtaaaaacattatcaatgattaagaatatttttattaattaagagaagtttcttcatctatcgttgctacattgttgacaagtagccttaggaaaggctgaatgttttcttatttttatacacacatttaagaatttttgtattttttatttctttttacatttaattatgtttcatattttaaagtttcaattttctttattcttttatgctaattctaatagaaaaggcacatatatcatcacactgttactttctccatcccattataattatcatcttatgttaatttacacatatcaagaaaaattaataaatgaacgacagagaataacaattttacaaaattaaagttataccattaattcaattttagttattgtaaccatatcattaatattataataaatataaatgaaaaaagataattaatattatattaaaaagttaaaataacaattattttgagataatgtttttttcttacacgataattattataagactgaaagagtagtacacaagcaaaaatgttttgaaaactaatgaagaaaattctaattgtattttagttatacctctattcttgatattattaagtataccaatgatttgtttttagaatttgttgtaattaataatttttctagatactctacttagaaaaactaatgatcacaccaaatcactatcagcataattagtgatccagagaataaaggtaaaattaagatataatcaaaattttcttcattaaaaagtaatgttaaatataatgttaactattttatgttcagaattgagataatggagatttagtaaagttgcataacctaaatttggtgagagacagaaagcgggggtgaagccttgaggtccaaatgacaaagatagttcatagcaaagcaaccagccaacttcttcaccgcaccaaatgggataggaattcctcaaatcagataccaatttaatgcccacattcaatgttatttgcccttttctggatacatacatgtaaatcacttccttcatccttaccacttcatttttctttctttctgaatcatatgtatctttcaccttgatataattatcttcgagttaaatagaattattataaatgacataattatttatccaggtatttaatgtaataagattttcaggattcaaacttgaaacatctgattaatttgaaataatttcacattaattaatacatgtacttgatgttctttacacttaacttttttagataaatgcttatttatttttcaaaaattaataaaataacgtatatttttaaaaataagtttaattaaatatacattgagttttatcaaagtatcagcccaaggccaagttccaactcgaaagtcgttttaccttcaaggcttcaaatcaaaatcacccaactgtactttagtctttagtgtagcagaataatggtataacataaaaataagatgaatgtaaccttcaagcattcttatcatatgaactctcgtgttactcaccacattcacactaaggtgtgtacgtgcatattaaattgtacatgcatattaaattattaataaagaccatggtagaaaaaccacgacaaataatgttgtccgattgctattaaagtaaaactcaaattcaacggaaggacaagttcatgaaacaaatttaaacacaagtgtaacgtgggaaaggtgaggttagatctactaagaagtaggaattttattcataattgagttaaatatatttttagcttttgtaaaataagcaaattttgagtttgatcatgtatttttttcatctctcaaaatataaaatcattgtttttgatatttttaaaaatatcacttttaaaattagattaaattctaaaaaaacagagtggtgtcattaaggaagccttccgtaagagaaaaattacttaggaatcaaagagtggacagttcaaattgggtttgataacattgattaaaatcttaatataaattttttaggaatcaaagagttattcaatatttttattatattaaataatttaataaaaagtaagatgatatttttgcggtagtaaaagaaaaattacttgaaaaagtaagatttttttcctcttgtgaaattttttcgtgagaaattaattaaaaacattcacagaaaatattctttcttaggaattttattttttaaaaattgataccaaatatggaaaattaagttttccaacttatgattcccggaaagtaaacaatttatctcccaccaaacacttcctaaagaaaaaactaaaaaagtgatacaataagaaaacgctagcagacattgggccttgaatgcgttattcacctattatcaatccaggtccatagaaagaagcagttcagtttttccggattcggattgggttctcattttggatcttaaccgaagcacactccgttacgtacgaagcatcctaatagcattggcggaaaccaccgttcgacgccggagacacgatctgtttcttcctctgacttattctcttcaggtaattaaaaacacttttctttctccactttttttcttcctctgactttgcaatttttcacttcggaaacatctacatggataggaaatagaatgccaagatgttcaccggtaaatttagtcgagaacaatatctaaactgtttttcatgttctgaattggaactttattgttattattattgccggtaaaaaagtacgttgtaggtcctcagttttcgattaaaattggccatgattctggtatggtattttttataattgctgaattctggtaatttttcaaccttaaactggttgaaatagtttgattgatattcagggtgtttgattgcgtttataatctggggtagtttgatcggataagcttttctgataaattttttttttcagtttgatacacaaatacctgtttttctttgcttgatgaagtttgatttttagataatttgtataactactgaacagtgtaggtatgggaatcagtaaaacagaagtaaacttgaggaggttgcttgcagctgctcctcaacagcaaaatcaagcaaaacttgtgcatgtaagtctgaagataaaccttttctaattttattgaaatatatgttttattaatttagattggctgatagtgtgtcttaggacggagtggagaaaaactataagtttggtgaagagttagatccgttattatttctatgttcgagacggtccatttttagttcttttcctattcatttttccctctttctttcaccctttttttcctttattttattttcttttcttttgacttattttccctttttcttcccctcccccttccttttttttcaacttcctcatatctgtcattgggtttatctaccatcgaccccaattaacttgtgttaaagatactgttgatgttgatatattttattaatttagtcatttcttaactctggaaaaacataattaatcatttgtcgatttttggattttgcagtatgttgctactttgcgtgaacaattagaacagttggctgaagaaaggacactggaaggcttaccaaggtattgtacgtctctttatttaccatctgatacacataggtgtcatggaattataattgaaacaatataagtgcattcatttgtgtgtataaatgctctgctatggttatgcaggatttcaaaggctatgttgaatgattattcagagaagattgaagccattgcttccaaattggttaatcatgtggtgtgtatttgttactcgtttcctctatttctcagctcttctgcttatgggttcttaacacattttcactttggatcataacttttgttcaaaatcattttaattttttaactccgtcctctttttcacctaattaaccaaacttttaggatttattacacaacggagaaaatcatattacattcactatatttttgttatacaatgacagtaagatattaacccaagacatcatgcaaactgtccaaactctcagctagtggtttataatatgttcactatagcatgtgaaaagtgttgcatttgatggctgtatttttgttgactttgttggaaatatggaatgcatcatgaagttgtaagctcctttttggttttttcaatttatgtaattttagttttggcctaataagcacaatcattcaaccacagtttttttaacccagattgacacacaagtacccaagaaggacttcgaaaagaattttgttaaagaaaaacattctgaaattgaggaaaaaaagcagatactcctttcttctggattgagaagaaggcctgtgtaagctaaagttagcctttcttactactatgtgtattttgtaggctgttttactgttgctcatctgattcattggacagacctgcctcaagtacggaagataaagcgcatgagcctgctgagactgaccacacatcacctattaaactggatgctacagcacatgcacacattgaaaagcacaggtactgtttatttgagttgttatttgaagtttatgtaatggtggatccatagactctgtactgcttttatggagagtccataacctacaagctacaaaccttatgttcatatgtcaatttgtctagaacaacaaagtatatttttcttcaggacaagcaccgatgtattaaggtcaatcgttgatacattgttagtaagttaccagtgaccatatgttactagcttaatatgattaggattatatatatttgagagtttatatcgtcttcattgactagtcctgaggatgtttctgaatcattatcattatgataccaataatttccattaaatcatgtgtgctaatgtattagatcaataatttttatagtcatttactgtgctctctagatactcagcatttattgttatcacttgtgttttcatagtttttctgttttattcaatttttaatttagaaagcttcaagaagatttgactgatgaaatggtggttttggcaaaacaactcaaagagagtagtctcacgatgagcctgtccctgcaaaatactgaaaaggtctcgaatctcattttcatttaatcgtgcttgtcttactgctaaacagttatatgaattggttgtgggtggcttgctttgcagatacttgattctacagagaaggctattgaacatagcttggcaagcaccggtcgtgccaatgtgcgagcaacggcaatctactcggagagttctaagacttcttgcttaacatggcttgtcatgtttgtcatgacatgcgtatttgtcatggttattcttctaatccgtgtcacagtgtaaaagaaataacttccaacataactttttatattttttttccatagaaatcgaagacgttgtcaatgtcaatatgaggaattttataacaattcatacacttttatttaaccaacttaaccaactaaactagactctcttaatccttgtcacataatctaaattaaattgaaaaatgttaacattagttaaaaaaacattttttttcttatgagaaagtgttttaaatgatcttttaccataatctctaatgtagtttattaactgtagttttaataagaagtttctatttattcatttcttaattagtctccttagagcactcaataacaaggctatccttctttatatataaatttaaaactatctatttctttattctttcacgttcattcttaatatttttcttttatgaagtggtgcatttcactctaacatatgatatattcttttatacttttaacttcaattcaacgattttacaaattgtcactgaatattagaaatcaattttaaatacatgtgacgtatatttaattaaattactactagtataacgaagcttatattatttattgatagtttgtttactataattaaataatggttggattatttaataaaaaataataatggttggattctgttagattaaaaaaaaagtgaaagcttttaaattaaaatcaacaaaatcttaactaatattaaggttatgacgttatgtttgacccaattttttaattctattaaggtttaaaaataaagtaaaagttttatgaacatttttatttttttgttgtaaaattcctttttaagttaaaactgtttggtaaaaaaaagtttagatttatttaaaactaactgcctcactcaacaaaataatatattgataaaataaacaataccaaaatgcacaagattgtaattaaaaggtgaaaaaattgaacagggtttctaaacaattgagcactattttcttctcaattttatcatccggttccggtcacaccacatctaaataaaaggctaaaaattatacttatttcagattttctttccatctagcatgagcattgcctaggccattgcttatagataagcaaatggaagatgatgttctgatattatgagatattatgcttttgtgtattttcaatgtaggcaacaaaaaagtcttatataaagtttacacgagtagaaattctgctaacaaaataacaaatccgacaaacagattctatatctataaagccaaataatataatatctataatgtctctttgactttttcaagcaatacatatagcttttggtgtaatgcgctgatgagaagaaaatccagaaaacagtgaattaattatctgattagaaaaggcatatatgatgagaatactctgaatctcaagatagatcaaacacagttgaataattttatgtaaaattgcatgcaaagtgtaaaaagtgctcagctaggtagcttctcctttctgataggattttcctttgtagttaattaaactaaaaggtgaatggggatcattggcttccctcattaggtaacaagatggctaagaaattgtcataaactcaactcactaatttaatttcttctttgcatatatataagcttgatttatgtgttccctgaaccatgattctgccaaggaaaaaatgaactggaaggtacacatagcaaactcttgtatagatcatcataataagtttattaaaggaaaccatttataattgggtgatgtcaaatttatcaaattttcctgcaccccattacaagtacattgccaattgccatcaaattattatatatacaaaaactatgatcagataatagagtcaaagacgatcgacaagaaaattattgggtccgagaaagagaggaattaagccatatataattactaataaaacatgtattatgcctcaaatttatagtgaccataattaagcataacactagaaactattccaagagtaaacacaaatgtagtgtaattactaagcaataccacagaatgaagcttacactgactactactatatccctcctcctcctcctcatcaatgcatgtcttgcgaaattcttctatgccgctggggccacatcaatgactccattatcatcatcgtcatcatcaccttcatttgagatacaaaagttgtggccaaattcatgagttgcagcccagtcattgcccaagggcacaccatattcttccttgcaaataaagaccaccattgttacacagatatatgacagaatgaattatactataaaataaaagactgcctcggttgtgacctaggttacatttatatatacattagaaatttgtatttttaaaataaaagaaaagaaaagataaaatatagggtggctagcttagtagcttttaatatattgcgaaatccaaattggatcattctaccctttacaacacataataacactttttataatttatttattttcttatctcttttcattccattgttcattttatttatctctcttcctattacttcatattaacggttatatatatatatatatatatatatatatatatatatgtttctctcatttttctttctttcaactaatgggtgtctgctaattgtttttgtattgttttatacttttgtatttttctttgtttctctcttaaatttctgaaaaaaattgtgtgagaatagcatttctcttggagattttctgaaagataagtttgcctttttgttctttctctactaccaacgagctaggcacttttaattttgttttcttgttagaattcaacgttctttatgagtgcaaaggaggcaatggctgaggtggtgaagcttctgaccatacaaatttccatggtggacaaaacttgaggcaagctcatggcttcatgttgctaaatgcatttaacatgtggagttaagtgctgcacacacgcttgagcttcaccgtcacatgcacttggatgacatggatatgccaaaaacagctagcccacgaaagaaaaggtgaatgtaaatgccaaagggtaaaaacctttacaacataggttttggccaaacatgatcatttgagaggaaaagaggattttcaaacacgtgtgcttcatcattcatttctccctcgtgactactcaaatatatcacacatttgtggcttaaagcgactgggttaggtacatatattataattttattttttatgagtagtagtggacatttctttcctctaaatacattgttaacatttattatttttttacatgtacaacaaatcttaaaacaaagaaatagaaaggaagaaaagtgagaggggagagaaattttaaaatataataaatgatatgataaagaagatagacacataaaatgataatgatagtgtataaattgttgtacatatatcatatctcaaaagtgatgttagacttaaataaatctaactaattttgctctatttaatgttatcattctaaaatattttttatttaatttttaatttttatttttaatgactatttttttnnnnnnnnnnnnnnnnnnnnnnnnnnnnnnnnnnnnnnnnnnnnnnnnnnnnnnnnnnnnnnnnnnnnnnnnnnnnnnnnnnnnnnnnnnnnnnnnnnnnnnnnnnnnnnnnnnnnnnnnnnnnnnnnnnnnnnnnnnnnnnnnnnnnnnnnnnnnnnnnnnnnnnnnnnnnnnnnnnnnnnnnnnnnnnnnnnnnnnnnnnnnnnnnnnnnnnnnnnnnnnnnnnnnnnnnnnnnnnnnnnnnnnnnnnnnnnnnnnnnnnnnnnnnnnnnnnnnnnnnnnnnnnnnnnnnnnnnnnnnnnnnnnnnnnnnnnnnnnnnnnnnnnnnnnnnnnnnnnnnnnnnnnnnnnnnnnnnnnnnnnnnnnnnnnnnnnnnnnnnnnnnnnnnnnnnnnnnnnnnnnnnnnnnnnnnnnnnnnnnnnnnnnnnnnnnnnnnnnnnnnnnnnnnnnnnnnnnnnnnnnnnnnnnnnnnnnnnnnnnnnnnnnnnnnnnnnnnnnnnnnnnnnnnnnnnnnnnnnnnnnnnnnnnnnnnnnnnnnnnnnnnnnnnnnnnnnnnnnnnnnnnnnnnnnnnnnnnnnnnnnnnnnnnnnnnnnnnnnnnnnnnnnnnnnnnnnnnnnnnnnnnnnnnnnnnnnnnnnnnnnnnnnnnnnnnnnnnnnnnnnnnnnnnnnnnnnnnnnnnnnnnnnnnnnnnnnnnnnnnnnnnnnnnnnnnnnnnnnnnnnnnnnnnnnnnnnnnnnnnnnnnnnnnnnnnnnnnnnnnnnnnnnnnnnnnnnnnnnnnnnnnnnnnnnnnnnnnnnnnnnnnnnnnnnnnnnnnnnnnnnnnnnnnnnnnnnnnnnnnnnnnnnnnnnnnnnnnnnnnnnnnnnnnnnnnnnnnnnnnnnnnnnnnnnnnnnnnnnnnnnnnnnnnnnnnnnnnnnnnnnnnnnnnnnnnnnnnnnnnnnnnnnnnnnnnnnnnnnnnnnnnnnnnnnnnnnnnnnnnnnnnnnnnnnnnnnnnnnnnnnnnnnnnnnnnnnnnnnnnnnnnnnnnnnnnnnnnnnnnnnnnnnnnnnnnnnnnnnnnnnnnnnnnnnnnnnnnnnnnnnnnnnnnnnnnnnnnnnnnnnnnnnnnnnnnnnnnnnnnnnnnnnnaatcaaaagtatacaaactaaaataaaaagacagttttgggttttctccaaaactaaacgggatttggcagagaaaaacttttacactaattaataaaaaaaatgaattatccttaatagctttatttgatctttttaaacgaataatagtcgttttgtttatttcccggaccccttgtgactcaaataaaatactttccctttcttaaaatatctctcctctcctcccatcccctacattagtcttttttatgtattaggttttaaactggggtagtatcaaacgccttgtaagtggcttcacaagtttgcaacagtcattaatgaagtcttgatccccagtcaaataatgagacacaagaaattctaaagaccccaacatagaattgttccctatttacattacatccttcagcctttcccagttccatcacaagtgagagaaagggatattgaaaatcaaaccatttacataaggaagaatctattcatacttctttcctttgagctttcccttggggattttgctgagcaaaccagtatccagcttctgatagtgattttgcatctgatcaaagaccttgtacacaaagttgtcaacttgatcctgatacctttcatagagaactgggagtgtatgtgcagcaacaaaaccttagacataacataatagaaattttagcaaatcaggtatgacctgaaaagtcaaactagaaggaaaaacatcatcgttgaacttctaacaggtaccatatcatccatctgaacttcaagaagaaaaagatccactatcccacaaaataatatacatcaacatacactaatatttgatttcaaataagatttggtaattgaggaggcatattatcagaaaacacttaacaaggcatacatttgtgtgtgtggattgtgttacaccatccaaactcctgactccagcatcttaacaggaatttaacatctttcaaatcgtttcctatgctacacagttatcgcatagacagacaaataacaagcttttgaaagttaatatgtcgttttaatcatccttcatatccatcatacaagcacaacataaggttggctttaccaaatactaatataatacaatttccataatttcaataattcacatttctctgagcaaatatttgtaggattacctgaaattttgaattatatttttcaaactttgtctgacttaataattcaagcagacactctggtcaacacattctaatctatatcaacagatgaaaagaaagcaggtctctcaccaatatacatgacagtcaaaaaattgcaccaactcccaatcacagcaccagcccataagcttactacaacctggggatgttatagccattatcacaaattccacaaaaaaagcatatattttccctttgcaacaaaatataaaagtaaatataatttatcatatataacataaaaacaagttataaaataactgatggcaaagtagaaagtgcatcatcatggttgtgcagttaaagataataaatacaacccacccacattgattctttgtcatataatactactccaagtcatgtaaaacaacctatattgacccttgaagcttataatttaaaatccttgtttccccaattcaattctatcatacctccggctggatgtcagtctcccccacccccaacctacccacacccttcctgggtgccaactccttgtgttttttgctcagtaattcaaatctttggcaacaacaaagtaataaaatcaggaaaccacacaataacaaacaacttaagatcaaatgactcttagaagataatgtcacataaggtttagttgacttggcaagttcccacgaactcaagaaacttatccctttctacatgagtacaaaatagaaattcgaagaagagaaaaagcaattgacaattttgatgagatatgtcaataaaatgtcacaaacagaagatgttgtagcaaacaaaaataaatggaattgattgaatgacaagtactatagcaaatactggtgtcagaaactgaagaatggtttaacctggaaactacattctaatttctaagcatgaacgtggatcgtaaataacaattacaatgaaagcaaacataagagtaaccatacaataagaaattgttttaggtttcctccacatgaaacatcttggagaaacctcaaaccatggttaacctcagcaccaactgcagttgcaatattcacgaagatatcatctgggaggacaaaacggggaactttagatggcttcctgtcacccaacagagaacaaagcatgtttaagctgtaaagtagcataatatatttacataaagtaagacatcaaaagaagagaagatgcttggataacctgctaaacaagctggaagcatttgtccaaataaactgtccaagcataccaagagccacaacaaagaataaaatagttaggaaattataattaagccattcaaaaagcacccatatagctgttgctgcggataaaacgctagcagagatcttcttgttcctccataacaagacatcagcagctgcatcattcaatggaaacccaaaaaaaaagtttagaagtcaaggccaacatgatagattttacaggaaattatctagaactaccatacattttccaccccctaaaatatggtgcacaggtttctggcgtccaaatagtctattgaattgggagctcactgagcttgacttgtcttcaaaaaatgatccagatttttgcttctcagtaagtgtttccacaatggtgtttaaaaggttttcagctgtgattttctcagacattgttcctgcacttctatacgaacaaaaaagaacatcacaaaatgttgcatgaaaatagcgatcatgcctatcaccactgcagcatcaatcaccattcataagaaaccagcacacacgaaatgaatataaatatacaattttctttttcccgaaccattaacaaaagagaagaacatactaccgacatcaagtcatactttcacaaaggcaaaaagttatctcgtctaaaatgaaataagtctaattggtctatggtcacaaaaagaaacatctctggcaattaattattaacttagcctatatgtatttaaggcttaagctacatcaagtttactacttcaaccccattaagtctatttagtgtctgttgttttagattgttattgctgcaaattgggtcttaacttcatagtgtctatagcgaactatttagcattcttgataactttaattattatttttatgcctttttccattactgtcatagtcattccaaggcctgaatatggggctgattgagtttttgacattgtatttgttgaaatttaaaggatttgtatgcaaaaggaaaatggagagcacggtgaatcagtgcacaacataaagtatgttataatgagactctgagtgattgtgacacaaaacacagactaacacctcaatttactgtatttggttgggcagaaaaaagcgaccaaagagagaattatttgaaatattgaagtaaagagaaaatgaatttaactttttttttttttcctcttannnnnnnnnnnnnnnnnnnnnnnnnnnnnnnnnnnnnnnnnnnnnnnnnnnnnnnnnnnnnnnnnnnnnnnnnnnnnnnnnnnnnnnnnnnnnnnnnnnnnnnnnnnnnnnnnnnnnnnnnnnnnnnnnnnnnnnnnnnnnnnnnnnntcctcttatttcttttttactttcttttcttaattaaaaaacataaactgggaaagcagtaaagaaaaaggggtaccgcaagtttttttcaacccaattgagaagggcatgaaagacgagcatttgacatataatgagggatatgacgaatatacgaagaaattcaaagtttaagcacaagggcaaatccctaactggagaaattttcagtgaattcaacaagacagattagagaaacgaaaaccagtagaaacgcaaaagaggcagcatcaaaggaagaagcagaagcatgaatttaatcaattaaaacagaaaaaggaatgattttcgtgcacaaaccagagaatggagaggagggtagaagcgaagtagcgaacaaagtactactgcaaaggcacaccagagagagagagagagagagagagagagagagagagagagatgcttttacgttggtataatgaatggcagaaagaaagaaagtgtaaaatgcaaaagttactactataaaatataaataaagtagtatttgaaaagagtttagtttcttttattttaactagttgaaaattagacactccatccatgtcttgtgcattctgtgtcatgtgttttatttgtcttttttgttttttagttaaatacaattataatgactatcatgttaaaaagtaattcctttcatttttaattataattttttaactaattcatgattctttaaaaaaattaatttaattaattatattaaatttgtcaaataattatactatcatttcaaaatcatctttttcttatctctattcacttaattgtttattattgatatttggagacagaataactaaataaagatatgtaaaaaaaattaatatatctaaaaaatttaaaaaatgtatgatgaaaaataaaaataattttctgaaaaagataatataattagggagtattnnnnnnnnnnnnnnnnnnnnnnnnnnnnnnnnnnnnnnnnnnnnnnnnnnnnnnnnnnnnnnnnnnnnnnnnnnnnnnnnnnnnnnnnnnnnnnnnnnnnnnnnnnnnnnnnnnnnnnnnnnnnnnnnnnnnnnnnnnnnnnnnnnnnnnnnnnnnnnnnnnnnnnnnnnnnnnnnnnnnnnnnnnnnnnnnnnnnnnnnnnnnnnnnnnnnnnnnnnnnnnnnnnnnnnnnnnnnnnnnnnnnnnnnnnnnnnnnnnnnnnnnnnnnnnnnnnnnnnnnnnnnnnnnnnnnnnnnnnnnnnnnnnnnnnnnnnnnnnnnnnnnnnnnnnnnnnnnnnnnnnnnnnnnnnnnnnnnnnnnnnnnnnnnnnnnnnnnnnnnnnnnnnnnnnnnnnnnnnnnnnnnnnnnnnnnnnnnnnnnnnnnnnnnnnnnnnnnnnnnnnnnnnnnnnnnnnnnnnnnnnnnnnnnnnnnnnnnnnnnnnnnnnnnnnnnnnnnnnnnnnnnnnnnnnnnnnnnnnnnnnnnnnnnnnnnnnnnnnnnnnnnnnnnnnnnnnnnnnnnnnnnnnnnnnnnnnnnnnnnnnnnnnnnnnnnnnnnnnnnnnnnnnnnnnnnnnnnnnnnnnnnnnnnnnnnnnnnnnnnnnnnnnnnnnnnnnnaaaattaattttttcatgcgacacaagcttgtttcattttttatttttcctaaaaatatcaaatagacttatactactataaaataatagttatgaattaaattgagtttattaactatgaattgtcaatacaatttttttaacattgtgaatcagttaaaaaaaatattatttatatatattttttataaaattattatatataattgattgtaattgaataatgaaaaaaattaattaataacattattgtatagactattttttattattaattttatattactgtaaatagattttatgctaattattttatgatttttttatttcttaaagtaatgatttaatgatagaaatgtgagttatcaaaaagaaaaaaagaaaatgttatattttattgaaaaacaaaaaacaaaatatgctattttatgttttttttttatattcttttataatttatattaatatttttttttattttcttaactaatatttgaaagacactaaataccaaacgaacaagaaagatagaaatgcagtatctcaataaagaactagtgataattgaggaactcagcaaccacccttcctttgcactagtgttctgaaaataaaaacaaaacgcacgtgaagctccgtcatttcccatttgggatttttggagtccgagcaacgccgtaaacaacactgcagtatagtatactactattcttgagcaatgaccatctctaatgtttgatcaattgattgattaaggttttttttttattatttattttcgtgggttatagtactgcgactatatatgtcaaatttaaattttttaacaaagatttattttactattaaaatttttaacttaatttttaatttaactttgtgtgttctataattgatctcacataattattaacacttctgattagacatgacaacgggacggagcggggtcgggtattgcatttcccgttcccgtccccgcttccaaacccgctccccgcccccacccctgttctccgtcggattttaaaacccatctccatccctgtccccgctggggtcgggttttcgccgctccgccccgcccccgctatttgattgaaatttaaaatataaaaaaataatataattttttattgaaaaattggataaaaaattaattatgtaacaaaaaaataataataacaaactcacatttaaaatatggaatcataatttttaaaattacaaaacaaaatcaatcaatttaattaaaaaaattagaaaataatatatatttttttaatattatttattatggggcgggggcgggggaggggtgggtatcagtaaccccatacccaccctcgcccccacttttggctatcggggaaaacccgaattcgaacccgaatccgaaaaatttcgatttttctccattaaaatagggacggatttggacgagtactcacggatttaaatcccgttgccatgcctacttctgatacttgttgcaggtccttttctgttgattcctaacattggccatataatttttcttttctccttaccacattcgaatgatcttagaccaatttagttcacttgagatatcgataaatagcatatgttagataataccttatattatatgggttctactgtcccaagaattgggaaatcgaaatggcttattctcagttttttatttccacaaattattcctttattatttcaattgttttattttttgtctattaacttaatatctaatatatttaacaacaatattaatgtgacattatattacaccgtcctagcggcacattcatactagcacgatattctatggtatgactacgtcaacacgcagttaatgaagaaattaatattacacaattaaaataattaataaattattaatttgagggtactaaatttgatttctttaaacaatatatctgatttgatcattataagtgaaaaaaagtgatcgttaaaagtagaaatcttactaaaataactagccaaaattccaagcaaaaattattaatcaacaaagttgttaagtatttcactctaatgtgataatgatccaaaataattagatcaaatccatgagaaagaacaagaaacaaaatttataaaattaaaactaaaaagataattaaacttagagaaatattaataatatattctctaatatacttttttatggccttctttattattaattgaaatttaagaaaaacaataaattttgatgaattttacttttgatttaataagggattttataatttagaataaattacacatattcctcttgagacttatccttattatacctaacctgatatccatttattttcacacaaaatcctttaatttttttagttttcgttatataaacctcctctctcaggcgtaaatcgttaagtcgatcctctttggaggaactcaaagtaatatataaaaaaaatgaaatgatattgagcgtaagaagagcgagaataggagaatccgtataatttgctttatagtttttaataacttcaaaacaaataatagaacgtggaattgaaaaaaacacactattagaaactgtagctatgctcttcgacctaatatctaaaacacaaagcgattggaagttggtctattttgttttggaagttagtctttaattacctgaacataatttttcacaaaaatattaaaaaacaagtacttgaacgaatacaagatcatatatataacaaaaagtaatgaatatgacagtgtcttgtcccaaaatgggtatggcatgaggcaaatgagaatacgtgatacgacgtggcaccaatgagagtttctattaccttatcccacatcgacaatctaatccaattttcccaatcatcctcttccaaaatccaatatccaaaatcctcgttgccacataacacattgaaactaaactccaacaagttcctaccatagtctgaggaaagtgaacgagagagagatcacagacacagagaagaatggcttctacacaatgtttcttgcaccaccatgctcttaccacccctgccagtgccagatccccatcacaacgcatcatggttagcaccaagcctaaccagcttgtttgcaaggcacagaaacagcaaacaccacaagaagatattgatgtcagcccaatctctcgccggttagctctaactgtgctcattggtgctgctgctgttggctccaaagtccaacctgctgatgcagcctatggtgaagctggtatttcattgtctctctttttatgatcatgcaatattaaactcaaatgatgataacagctcattagtctttggcttttgaagatgaaatactcatttgcatgattatgatttttttatactgtccactgctcgcaaagatcatgccatgcttcaggaaaaatatgttattttttggtgccatgaaaaatcgttgaccacccaaatggctagctgcaaattgctttgaacagatttctagcatgcatagtaactaaagtgttactataatctacttttgattttgtgatatttgtgaattgtgtactctttactacttagtagggtttaagatgaaataaatcgagtgatcataaaccaccaatcacatggatcaattagtaaggggtttctccagcttaattagtgatctaaagttcgaggtctaggtgtacagttgagttgaatacgccaaaggaatgctttactgccgataatagtcttactcgaatcgagcaagattgccttccttctgccgtagatacctgtggtctatgctaaagaatatagtgattataggatacaatccaagggtaggaatttacataggtcttgatggtggaagtcgataacgaaatcaattcagatgcttagactattttgaaaaataaggtcgctcaaaccttgtgcagaaattataattgaaagaatggagttggcaaagattattagactctaaaataaccatttggtcataaagtcccgaatagcgtgtcaaggaccagcttatgcttatctcaaatgtataagttgttaggtgggagttgatccctctaataataatggggatgacatgatttatttgaacaacttggttgttttgcttgcagccaatgtgtttggaaagccaaagacagacacggatttcctgccatacaatggaaatggattcaaactatctattccctcaaagtggaacccaagcaaagaagttgagtacacgggtcaggttgttagatatgaggataactttgactcaaccaccaacgtggttgtcaccatcactccaactgataagaagtccatcactgactatggttcacccgaagagttcctctctaaggtaaacctgttttaaactagtacttctgtttgttttctaattaataaggaacacttatatatagccccattaatgtacagtttttatgtttctaagtaccaacagaatcactgaaatagtgaccaaatttagtaaagaaaaactgtttatatcactaattctggcaccactaagttttagtgacaattttttttcttcaattgcatatagattattcccttactaattttaacctttttagtatacattcaaaaagaaaaatggtaatatatgaatttttgaagacagtgacaccagtttctactttctggctgaaattcaagatttggtgtttcctcgttacaggtggattatttactaggaaaacaggccttcttcggcgaaacacaagctgaggtaagtgattgatgatcaaacacgatcgaatgaatgcgccaaatatcatcttgcatgccctaactgaagtctgaacttgaattgcacagggtggttttgatccaaatgcagtggccacggctaacatcttagagactgcaacacctgtgattgacgggaagccatactattttctgtctgtgttgacaaggactgctgatggagatgaaggtggcaagcaccacataattagagcaactgtaaaagatggaaaactgttcatttgcaaggctcaagctggagacaagaggtggtttaagggagcaagaagatttgtggagagtgcagcaagttctttcagtgttgcttaaaaaacttcaatagcattttatatatatatgctgtgtgtaaatcaaccttttaagtgctatctattgtttgaagttgtctaacctcccttttgtccacgagtttcataattttaagagacttggttggattaagtatctgaatacttaatgtctccttcgttaagctgctacaaggagtatgcattttcgtaacaaggcttaaatttttattcgagaaacaattatctcaaggaaattaaaaagtgtgaaatgttgattttgaaacgtagttatttgaaagagaccaaagaaaagaaataagcatgaagaacaattaatggagtcttctaacccaggactgcataggacaaaacagaaattgataatttataaggacaaaacttagcgcagtttcttaagggttggagatgctgttttccattcagaattggcgttttacattagtaatctgcattaaattaaagatcaatgtagattactaaggtgaaactcaaataccaatgaactgcattgtgttttgatcattccaatatcatgattaataggaaccaggtttgatcattagtctgtctatggcatggtctaatggtttgattattgggagccactgagccagtttcgagacaaggcaatagctaaacgtagcctgcaaaccataaaagttgtagtctcttatccagaaaataaaaagaagtgaacatatatcaatgatgtccataaaatttaataaatttgttttacagaagaatattaaatatatctaaatataatcaattaaaataattaaaattcaataacaattcgggttactaatttcaattattgtgattccagttaactataaagtgagaaatttttaaatagaggaacaatagtttattatcttcacaatagaagaaataatagtgttttaaattattattatcctcaagaaagtggaaataatttattatccccacaaaatcggagatgagaggtgcaagatagttcaaatctaatacataaatttttatgattgtacttatttatcataaaaagtgaaaaatatttatattctataattaaagtaaatatatataggatccaattcatttggttcaacaggtacatgatgcataaattattataaaattttcatattgtctttgattcgtacgataaaaaaaatacatgtatatcaagtgatcttaataaaatcttaaaaatttgtttaccgaaaaatattaaatatatctaaatataacaattgttagtagaataaatctagacacacaaaaaatctagatcccttattaatgatcacactggagtgtaaggaatttaaataaaggaacaacagagttgagaaaattatccaaaatttaaaatttaatacgagtgagtgaaatttaagaggtgcataaatgtgacaaaatgggcccaatctaaacagcctataaataaggccgggtcgggttcttaaatttagtccgaagagaattgagccaatttggcctaatttgacggattagatcaaataaatgaaatgtatgcttgagacctactgacttatttaatctgatatttttttcctttataaaagttatataaatcaatttcatgaaatgtgtgctgcaaagaaatcaatttcattggctaatgaatcccaacttacttactatttgtattgcatctaacctatctgcgcagttgttgtttttcttgtaaattatcagcagccgagtttatatgaactattgaggtaaaataagtcaaaaaactattgaggttatgctgattaatattgttattgtagagttatacactatattatagattaaaatagtnnnnnnnnnnnnnnnnnnnnnnnnnnnnnnnnnnnnnnnnnnnnnnnnnnnnnnnnnnnnnnnnnnnnnnnnnnnnnnnnnnnnnnnnnnnnnnnnnnnnnnnnnnnnnnnnnnnnnnnnnnnnnnnnnnnnnnnnnnnnnnnnnnnnnnnnnnnnnnnnnnnnnnnnnnnnnnnnnnnnnnnnnnnnnnnnnnnnnnnnnnnnnnnnnnnnnnnnnnnnnnnnnnnnnnnnnnnnnnnnnnnnnnnnnnnnnnnnnnnnnnnnnnnnnnnnnnnnnnnnnnnnnnnnnnnnnnnnnnnnnnnnnnnnnnnnnnnnnnnnnnnnnnnnnnnnnnnnnnnnnnnnnnnnnnnnnnnnnnnnnnnnnnnnnnnnnnnnnnnnnnnnnnnnnnnnnnnnnnnnnnnnnnnnnnnnnnnnnnnnnnnnnnnnnnnnnnnnnnnnnnnnnnnnnnnnnnntatcccatttccagctaagttttctcattgtttatacacagcaagaagattagattatgataagaaagtttaatgatcattaataatataaaatatttttatattattatttaattataatttattgttaacgatttttaaaacaattattataaaaaataataattatataatatataataaattatgattaaatattagtgttaaaaattatatatgcataaattaaaataataatttcaaatttattatctcttcattcactaatacatccaatataacaataattcaaattttttcttatctaaattattttaacaatatgtttttatctaaaaaatcataattcaaattcaagttatatcttaaaaacaaatagtatggttttttttaggctgagagtgtacaatcctttactcttattataatattgaaacgaagttatttgcgtgtgaaaagagaaccgagaagggaaacgcgtgatggtttaagaaacaaggaaggaaaaggcatataccaatcaccaaaccaaacgaaagtgtatctagcaaaggccaaagggtagtgattcacaccagacacaagggaaagctataaaagagaagactataaaaataagaaaaaaagaagagaaatccagtaaaatttaggtgtaaaacaaatgtattggtgccaattatttgccaattttataagttattcatttttgtaggataaatttggctaattatattccgctaaccaattttttttcttcattcacttgaactcgtatacacataatataaaataattatatattattatctaataataaatcatgattgatatgatatttgtgatgattatcatacaagtcataaccatattcattatagtaaaaaaaaaaacctaaatgaatacaaatattcgtagttataattaaaaaaatagtattatattatattttacgtatatatgttatcattctttgcagcacaagcagaaaaggagaaggtttgggattttagagcgtatgtggttttggttggtaactgaagagtgtgtggaagcagaagaagaaggaagaagaaggaatcggcggtgttaaactgacgatcgcatctcaaaggttggttacgatcgttgctttgcttgttcggtaagtcggtggatggatcatcgccgtctttatcttcttctccacttattggatctgccacttctgattccgattgttctatcttatcttatttctgttactgttccaattttctctgtttgtttcctcggaaaatgcatatataatttgtttattattatttatttatttattttgcaattttatctgctaggcgtcacgcaatctctcttgtttcgatagatggttataaatttggtagaaacattgtgctttcaagtaactaagcctggattcttgcatcttgcattattgttattatttttattgttgttgttgttgttgtttcaatttgaggaatctgtttgctgttttagcttctgttttgtcaggactcagtttcattgtacttactgttactgtttttgttttctatgcatacattttttttttttaatttgttgtttcaatttgtttgcttgtgttatttgttatgctaattaagtttgtgttagtttctatacagtgacagttttatttttctgtactgacattttctaagcttatgttaatttgttgattcaatttgaggaatttgtttgctgttttagattctgtttctcaggtcttggttttattgtacttactgttgttgtttgtgtttttctatgcagacatttttttcccttgtggttttttagaggcattttcttagttgtatggttgtttgtgttgttttctcgcttctgaaattatatatgggctaagggggcacttttcatgggaggtgtggaagatgaagaaccatccatgaaacgaatgaaattatcctctaaaggattagttggcttgtctaacggttcttctaaagagcctgttggaggcttgtccagtgacttgatggctcggcccctaccatccaaaggggacgaacatgttgttggttccaaaggggttataaagaaagaggaatttgtcaggataattgtaaaggcattatactctcttggttacggaaagagtggggcacatctagaggaggagtctggaatacctttacactcacctggggtaaatctgtttatgcaacaaattcttgatggaaattgggatgacagtgtagccacattgtataaaattggtctggcagatgaaagtatggtcaggtcagcctcattcttaatattggagcagaaattttttgagcttctaaatggtgaaaaggtcatggaagcgttgaagaccttaaggacagagattgctccactctgcattaatagtagtagaattcgagaactttcttcctgcttagtttcaccatctcctaggatagatattctaaggatgaggtctcgatcaaagcttctggaggaattgcagaaactgcttccccacacagtaatgatacctgaaaagaggttggagcatctagttgaacaagcccttatcttgcaacgagaggcatgcccatttcataattcattggataaggagatgtcattatattcagatcatcattgtggaaaagatcagataccttccagtacattacaggttagaaatgatgtgcctaatagatattgttgacttgttaattagtagtggtagtggaagcagcttcctcctttctgtttgcctattgcagactagaactctgttcgttagcttttcttttgcatttactttttcatgattataaagttatgtttactagatttgcgaatgctaaactgtggcatgttggaaatggatgtgaatatcatgtggtcattgttaaaatgcacttcctttcttgtaaatgagatttatgtatcattagttggattcaagggaggggaaatgagaaaaggtaaagaatttgtcttcagttccattgatccattcttttgctatttctttagaatgaccaccctgtctttactttctatagcatgagtcgtatctatattctgatgttattttctgattaatattgcaacagatattagaagcacatgatgatgaagtctggtttgtacaattttcgcataatgggaaatatttagcttcagcatcaaaagatcaaactgcaataatttgggaggtaatatttgatactgatctgagaatttacattttgtcttttctgttctctttcatattttttatatgaactgataaatgtggtttcattgcttgtgttttgattctgtcatcatactgccaatctatatcctagttgtaatgtattacttctgatacccacccacctaattgatcaagacacaagaattgcactctaacacacacacacacacactaataaaacatggcttaatgctatgaaattaggtctcactttttaaattttgtttgaataggttggcataaatggaaggctgtctgtaaagcatagattatctggtcaccagaagcctgtttcttctgtttcatggagtcctaatgaccaagagctcctcacatgtggagtggaggaggctattaggcgttgggatgtctctactggcaaatgcctccaaatttatgaaaaaactggtgctggtctagtctcctgttcatggtttccatgtgggaaatatatactttgtggcttaagtgacaagagcatttgcatgtgggaattagatgggaaagacgtggagtcttggaaaggacaaaaaacccttaagatatctgatttggaaataacagatgacggggaagagattctaagtatttgtaaagccaacgtggtactgttgttcaatagagaaacaaaggatgagagatttattgaagagtatgaaacaataacctcgttttctttatcaaatgataacaaattcttgttggttaatcttttgaaccaagaaattcatctatggaacattgaaggtgatcctaagcttgttggcaagtacaaaggtcataaacgcgcccggtttattatcaggtcttgctttggtggcctgaagcaagctttcattgctagtggaagtgaggattcacaggtatgagtcttcaatcatcattgatcaaaatgggaaaatattcatcaagtgtaatttttataatttgcaaattgaaagccttgatgtttgtatctctgttaaatgtttttattttttaaaagctgtctcaatatgttactttttcttcaaaataagttcaacatgcacttgatgcaggctatctatcgagggtcattaaaatattggcataaaagacacatgaaatggtgctttgtgctctgatggataaactggacatctttataaatattagttgaatgaattcaacttcaactattataatgttcaagaatcacgggcttctgtattatttattctaatttatcttggcttctgtattatttattctaatttatcttgataaaactaggagcatcttgattgataatgttagaattctgcttgatatgctctgtatttaaatctgttggagttcccttttgtattcttcttggccatcagtttgtcattataaccccaaagaaaatccacatttactagtttctagttgtggtgtttagtagattttccatgaggaatatagatacaagatgtatcttagattgatagaaatttagcaggtattaggtatatttatatctaatactaagccgggaaataaaaaaacgcagccgctaagcttctttcttttggatatgaaacaatacagcatgtaggacccttgtaatgttattggcattattaaccaaacttcttgtgatagtgaattctattggataattttggagaattattaaacttttattcggtatctttgtaggtttacatatggcacagaagctcaggggagctaatagaagcattggctggtcattcaggatctgttaattgtgtgagctggaatcctgcaaacccccacatgttagcctcagcaagtgatgaccgaacaattagggtatggggcctaaattgtctgcacaacaagtaccaaaatgttcacatcaatggcatccattactgcaatggaggaacttagtatgaccaactcattccaattgatttctcttttttcttatcattgcaattgtgtaaatactattactattatcgcaagtggaccattcatgtcaaacatgcatgtgacttttcatatatatctcataataaatccgtgttccattaacgtcaaactgcgatgcgagactttgtcttgttttaacaagtatcactgccatacgagggtttgctataataccttggtgaggatttctagacattggatggtggataaattcaactcaattgtttttgacagaaagaactccttatgattgagtttgggttctctgtttcccgagattcaaatttgagtttggggttgtaaatactaaatacctagcctcaaattggccattgttaatattagagttaggattttgttctcacactctcatttctcgtaataattgaaaatacaaattattataatgattaagtttgattcattataaatgaaaaagaaatgttgaaagatttttattttcttaaacaaatacacccaaattaatttcaattacttgaaacttgacataagttttagatttgcggagttctattagaaaaaaagtaaaaacactctcaggtaatgctaagagtaaatgtttttatctaatgtaactattagggctcgaaaatatatttaactaatttaaaatgagcatatgaagggaaaaagttaaagcttattattcaaatatgagcatgtgaagtgaaaaagtaaaaatatttattattcnnnnnnnnnnnnnnnnnnnnnnnnnnnnnnnnnnnnnnnnnnnnnnnnnnnnnnnnnnnnnnnnnnnnnnnnnnnnnnnnnnnnnnnnnnnnnnnnnnnnnnnnnnnnnnnnnnnnnnnnnnnnnnnnnnnnnnnnnnnnnnnnnnnnnnnnnnnnnnnnnnnnnnnnnnnnnnnnnnnnnnnnnnnnnnnnnnnnnnnnnnnnnnnnnnnnnnnnnnnnnnnnnnnnnnnnnnnnnnnnnnnnnnnnnnnnnnnnnnnnnnnnnnnnnnnnnnnnnnnnnnnnnnnnnnnnnnnnnnnnnnnnnnnnnnnnnnnnnnnnnnnnnnnnnnnnnnnnnnnnnnnnnnnnnnnnnnnnnnnnnnnnnnnnnnnnnnnnnnnnnnnnnnnnnnnnnnnnnnnnnnnnnnnnnnnnnnnnnnnnnnnnnnnnnnnnnnnnnnnnnnnnnnnnnnnnnnnnnnnnnnnnnnnnnnnnnnnnnnnnnnnnnnnnnnnnnnnnnnnnnnnnnnnnnnnnnnnnnnnnnnnnnnnnnnnnnnnnnnnnnnnnnnnnnnnnnnnnnnnnnnnnnnnnnnnnnnnnnnnnnnnnnnnnnnnnnnnnnnnnnnnnnntttaatcaaattttaaattagtcaatatcccttttttttagtcaaccaaggattaataaaaaaaaccattagaccctctcaacagagaaagtttgaaagatttttgtgcatttgaatgaactagggatgtttatagctttcatgaacatgtcataacaatttcttttggtaaacgaaggaaaagaaacaacaaaaagaaaattacactctaaggaaaatcagaagcaaaatatatgctaataagaaaccgtgtatttaaagtaaaaataacaagcatctacgatattataggaattttttttcttaatttaagtgaaaatataaaagtactactgctaaaaatttaaaattaaggaaagagaaaaattcttaaaaaatgaaaaaataaccacttgacatgtttgaaagttaacaactaattattttattttaatatcagatatttagtaaattagtagtgtctttcaaacacttaactcgtttatttccaataaaaaaaattaaaatagttgcaaaaagaacaaatacatatttttttatttataaatacatataaacaagaaggcatttacctagctttcaaaaagaaaaaaaaaggcatttacctaaaatggaaaacaaaaacagataaaatggaacagcggagaaagatacgatatacacgatgacggaaggaaagcacaagtactagctagggcttaactttttatttgtatggcggaaggtttttagtgtttttcttccaaagttaaatattgatccctggttattttttttataaccatattgtcaagtaatttctagaattttgccaattattaattttgatcaaagaaattaatttgatggagttcttccattctaattaaaattcgaatcgagaacttattaaaaaaatcagaatctaatattacttaaattaataatttgttgattgctaaattaaatattaatattaatctaaggagataatttattttcgataatcttatttcattcacccgaacctggttgcaatgcaaagccttataataatataagtgtataaggtttaaaaatttaacatttaacagagcaaagagcaaagacaaaagtagaatagcagtagctgcagctgcgcttgttgaatcaagttacccactggggatttgttcaatggaaacgacgaccaataggaacaatatagggaagaagaaaggagagccacttttccgtcaaaaccccaaagttgatgaagtcaccaggattcgcatttcccagattctagaacacttccgagcttccaatgatgaaggtatttcctcccccttttttcttcaccatttcatgcacaaaaaacacaactttctcgtcggaaggattatgatttttgcataactatatccattcatgaaatctgggttttgattatttagttatttatttgctgcagtgtacaagtttgatgctagtttgtccaaccaagagcgtgcttgggtgcatcaaatggccctcaaaatggggtttagatctagaagttatgggtgagtgttaagggcagcgcatgtaaatttgccacttttagttaaatctgtaagaattattattgtcaaaattcttaaatggaatagttagagatggaatgaatgcttcagatttgtgtaattgttgatattggacctgtgttttgtgtaggccagggaaggaaaggagagtgtgtgttgaaaaaatgaaaaggaaggttgacacggataacgggtttggaagtcttcctcctttcacattttctggagaggcaaagtgggtgttgggtgatttgtttgctcattatccacccggtgatggaaactcgtgggagatgatcggaaaaaatagtgacgacactactactgagggaacaaaacagaggccggatgatattttcagccggccctctatgtccaaagctgaaattgctaggagattggaagctcttgcttctagaatgaacaatgtctctaacttgaaacaggtcctccttctttctctctcctttcaactccagacatgtatgagttttgttggtgaacctacatatatgaattttgttgcttagagtttgcttcaaaataagggaactgaatattatttcactagcaataaaatggtgcaatggctagtaaatatatatatatatatatatatatatatatagacgaacaaattaggttgtgtcccatgctaatggctgatttattgtcacaaaatgttggagttacatattttatttggagttcatcaagtacaatttcaaccatgataactcacaaaccctttgtccatggcttagaattttgattttgcccctgcactcaaccttgcaactatatttttctttttttgcttctccatgtgaccaaattaccatccaagaacatgcaataccatgaggtggacctttttttttatcaatagtggatcctacgtaatctgcatttgtgcacacctccatggacaactttcccacttgtatgattaataggccactcttgaactattcttcaaatactatagaatttcattcattgtctataaatgtttctcatgaagatccatagttatcaatcttggatagcgacatgtagtgcttgtttgctatgtgtatggcaaatcatttgtctgtgcaaagaatgaaagcaatttgttaatcctgctacacatcagaatgatgttttcttattcttcctcttctgccatatatatagaattttcaaaagaatagtcttgttattgaattatttgtctgatttccattctcgcagatcattgaagggagatctaagcttccaattgcgtctttcaaggattcaattacatcaactgttgaatctcaccaggttaatttaaaattgcctttggatatgcatctacttggtagcttgggtgctgatggttgcattataattaagcttatatgattcacattgacatgctaaatatatcaaataacatagttgagtaagattttagttttagtgcatttcaacatgacaattaaattggatttgcagattaaatttttgcatgtgttttggtcttaatattcctttcacgtgtttcaaagcaggttgttctcatatctggtgagactggttgtggaaagactacgcaggttactaattctttgttttgtctttagtatggtacagctacatttacatataatttgtttgtgactgtttcaagatgatcatttttaggttgtatgttgatatttttataattggtccatttagtatgtatgcttgtgatatgactctgcacccgtatttaatttttgtattagtgcacttgctctttttacccttaatataaaataattggctcaagctttgatgattgtggacactgataattttttgatgctttgtgattttgggtttcacccatctgtatttccatcattgtatatggaccaaggtcttttagtaatctttctatgctatgcaaaacacttatctttctcttttttttattgtcctgtttaactttatattaaacatgattcaggtcccacaatttattttggatcatatgtggggtaagggagaggtatgtaaaatactttgcactcagcctcggcggatctctgcaacttcaggtgtgtgactctttcggacttaaatttcaatgttccttttttagtcttaattgaaatgtgtttctttcaatgttccttttttagttttaatggaaaattgtttccttctgccatttctatgtttagtttccgagagaatcgctagtgagagaggagagactattggagaaaatgtgggatataaggtaattttgtttatgtacttttggtgtagtaatggtactctgatcctttatttgaatttattttgtatagaaatatttatttgaacattgagcattgttatcataatcagactagttttttgcattcgtgtgttacactctcataacacaccatgtttttattgataccgaggaggaaatctataagatgtcattagtaacgaagaagcatgatttttctcagcatgatttttctcctgtcattgcttcaatctacaaatatcttttctattttcccatatcactttctttcttacatagaattatgactttttgcccttcaacattcaatatcctatgttgattatgccagtcctttcctaagcactggtttccttgcttcttatagtagcacattgctagttttcctagtggtttacatctcatgaacatataattctgtggcttacattttaaacaaaaaatccagatacgattagaaagcagaggtggaaggcaatcgtcaattgtgctatgtaccactggagtggtattaagggcgcttgtttccaaaggttatcattcgtcaaagatagggcgtgtgaaggatgatatttctggcatcactcacataattatggtacttgtaaattatttttttatctttagctagagcataaactatggtacttaatctttggtaaatacttcttctataccttattcttttgagttatttggatggttaaaaaattggttatattaggtatgactggtaagttctcagataaagtggttaattgaaaattcaaattgactaggaaaatctgttagaatccgagacatttttttttgaaattgttgtaaaattaggagctgtttggtttcagaaaatattttttgttttttacttttaattacaaaattggcacttgttttactttgtttcctattttcaaaagtttgtagaggaagctatgaaaacagaaaataatatttggttttcagatgggtctctcctgcaataggtatttgtaatactttgaggggaagtatactttgaaactttcatatagattattatcttagagactttgttgtgataagtgagaagtgaattcaaatgtcttcatatattccctcttcatgaatcttggcatatgaggcatttcctgcatatactttccttggaaagtatgccttggcattgcgaagcatatcctgtgcatcctttcctcggaaactatgcattgcaaactaaggtgacattcaatttttgttcaggatgaaattcatgaaagggatcgatactcagacttcatgttggcaatcatcaggtataccattgaaaagaacctattggcctttattctatagtgtggtatatttaaatacaaatgtataaatgcttgttgcataagtgaggagaacattgtgctgtaggttaagcttgttcgagatattttgcacctattagctttttgggtagagttgagtcgttccttgatgagtgcaaatgccttttttttaaccacaagtatgtggaaataacttcctgatatatttagtcctccctcccaaagaagaaagattatacataagttactggcataagaggtttgtctggtttttggactaatctctaatttttggtaatttatatgcagagacatgctccctttatatcctcacctacgtctggtcagttcaatcttattacatttatatccttttgtctctatttctctgtctcctgtcaagtgcttatttaatttataattatgttatttcccatttttaaccttctggtgctctaatattacagatattaatgagtgctaccattgatgctgctagattttctcaatattttgggggctgcccaatcatccatgttccaggcttcacttatccggtacctatatagtcgtagattgtaaattaactaatactttatcacatattacttactacaattgtctatccaacctttcttcaggtcaaaactttctatttggaggatgttctttctattgtaaaatcgaggcatgataataatcttgatagtaccacatttagtattccaaaaaacacttgtgagctaagtgaagaagagaagctttccattgatgaagctattagtttggcttggtctaatgatcagtgggacctgctgttagaattggtttcttctgaaggaaccccagaactatttaattaccaacattctttaactggtcttactccgttaatggtgtttgctggaaaaggtagagtgggtgatatgtgcatgctcttatcttgtggggcagattgctgtttaagggacaaagatggaatgactgcattggagatcactgaaagggaaaaccaaccagaagcagctgaaatattgaagaagcacatgtataatgatttttccaactccatggaagagaagaagttacttgataaatacctggcaacagtcaaccctgaacttgttgatgatgttttgatagagcagctgataagaaaaatatgtattgattcaacagatggagggatccttgtttttcttccaggctgggatgatataaatagaacacgtgagagattgcttgcatcatcttttttcaagaattcctcaatgtttatgctcatacctctgcattcaatggttccaagcatggaacaaaagaaggtttttaggcgcccacctcatggttgtcgcaaaattgtactatcaaccaatattgctgaaacagccatcaccattgatgatatagtgtatgtcatagacaccggacgaatgaaggaaaaaagttatgatgcttataacaatgtgtcaactcttcagtcatcttggatttcaaaagcaagtgctaagcagcgagagggacgtgctggccgttgtcaacctggaatatgctatcatctatattcaagaactcgagcagcttccttgccagattttcagattccggaaattaggagaatgcctattgaggagctttgtctgcaggtattcgatcttccctgattggtgactcagaatcttggtgctttttatatactcaatgttaaaatagtaaaaaagttctctggtatcccattagagtgtcaatattaaaagttagaaaatggcaaaagttagtaactttgcaatgctatattcaaacttataatttttcatgatctaatttgcgcaatgctgtgtaatgtagttggttattggtttgtgcaaaggaaacaactttcttgtcaggttttgggaagagcaaaggtccttgtggggggttacaagcagggtttcaatggactgattctatatgataatgaaacaagacaataattttcccctcatgctagatttggttcttactctctctctctctctctctcttgtgacaggtaaagttgcatgatccaagttgcaaagtagaagaatttctacgcaagacattagatcctccagattttgagtccatacgcaatgcaattatagttcttcaagatattggggcattttcaaatgatgaaaaactcacccaactaggggagaagcttggttcacttcctgttcacccattaatatgcaggatgcttttttttgctatattgatgaactgccttgatccagctttaactcttgcatgcgcatctgattatagagatccatttacacttccaatgttacctgaagaaaagaagagagcttcagctgccaaatatgagcttgcttctttatatgggggttgtagtgatcagtttgccgtattggctgcatttgaatgctggaataatgcaaagcaaatgggtctagaagcacggttttgttctcagtattttgtgtcttcaagcaccatgaatatgttatcaggcatgcgcaggcaactccaagcagaactaattcgacttgggtttattcatgaagatgtttcaggttacagtgtgaatacacatgaccctggtgtgctccatgcagttttggtagcaggtttgtatccaagggttgggagatttcttacaaataaaagtggaaatagggttattgttgaaacaacaagtggagataaagttcgcctgcacaatcattccataaattttaagttgtcattcaagaaaaatttagataacactttaattgtgtatgatgagattactcgcggtgatgggggtatgaacctaaggaactgcacagttgttggaccacttccacttttgctgctttcaacagagattgctgttgcccaagcagaagaaaatgatgagggggatgaggatgatgcaggaggtagtgaagatgaagctggaagtgaagatgggatggagtttgatgctgagtccagtggaggtcgtgaggataagttgatgtcttctcctgatagtatggttaaagtaatcatggaccgttggctttattttcgttcaacagcaattgatgttgctcagatatactgcttgagagagagattatcagcagcgattttatacaaagtaaataaccaaattttacttgtttagtttttcttgtacttttcacttttgtgatttatccatgtcattcctgttatgatattcttgacacattggtttttacatttttaggtaacacatccaaggaatacacttcctcccatcatggcggcatctgtgcatgctatagcttgtattctgtcttgtgatgggtgcattggtgtgcccgcaatgttagaaggtgtggacacactaaccactatggtcaatgcaacaactttaggcaagccagcaacaggtactaggcgttttggtaagagaccaaaaggatcccttgcagagcttttaaatcacgatgggcgccagacctctgggccttattttaaagcataggaagttcatcaagtgggatcaaccccaaacctgatcctgctttctcacgataatggtccaaacggaaggttgatgattgtatgttcagttttgaaagaagcttatatagaatacaaatcctaacagtgaaagtgaaacttgcgttcagctcatatagagaacaaatcctgacagtgaaaaattcagtcagaagattgcctttttgttccttgtgcaaacaatgccttctttttcttggtcggcagatgcgtttgtgccacaactttcaggtgtgtgcgcagtgagatgagatgatggattctggacattagttccctcgcttgtacaaccacatagtaaaatctttgtaaattctagtgtgaacgtttaatatgaagagtagatgtagaatagttaatgaaatcttttatattataaaatcaaaagaggaatgaaatctctgtgctgtgggctttgagttgatcatgatataatatttagagcgtcagcgataaacatgagatttatgagcatctttcttcatgtaacaagtcaagatttttattctggaaaaattgccctgctagtcagcctgacagacctaaaatctaaatttatatactttccacattggaactttggaaatatgtcagtttttgaacaacggaccgtgttaatgtctccacaaaaaataagcaaatatgaaaatgatggtcaatcgcatccctggatatttgatccattgatcaccgctgttacgtctttcaattagcctcaaaacaaagtttgatgtccccactgttgaggacatccaatgctttcctatgagcactctgcaccaagattataaatcaaacaaaaaggttatatcagcaacaacacagaaagtgatatcagtacactgctaattattaccagaattattatttaaaaaaaatgatctgttatatgtggaatgcactgaactgagaattttaagacagaatagtcgaaagaattatttcagttaaaaacaaaactggagaaagtgatgagttaagatgtctataatgccaatggaacagaccaaaatagaataaaaagaacatcagagagacaggaagctgagatatcataccagcaccattacattgtcattttataaatgcccagatgctgaaacctaactatttaggcaattaccatataaattttcaggaaaaaagaaaccannnnnnnnnnnnnnnnnnnnnnnnnnnnnnnnnnnnnnnnnnnnnnnnnnnnnnnnnnnnnnnnnnnnnnnnnnnnnnnnnnnnnnnnnnnnnnnnnnnnnnnnnnnnnnnnnnnnnnnnnnnnnnnnnnnnnnnnnnnnnnnnnnnnnnnnnnnnnnnnnnnnnnnnnnnnnnnnnnnnnnnnnnnnnnnnnnnnnnnnnnnnnnnnnnnnnnnnnnnnnnnnnnnnnnnnnnnnnnnnnnnnnnnnnnnnnnnnnnnnnnnnnnnnnnnnnnnnnnnnnnnnnnnnnnnnnnnnnnnnnnnnnnnnnnnnnnnnnnnnnnnnnnnnnnnnnnnnnnnnnnnnnnnnnnnnnnnnnnnnnnnnnnnnnnnnnnnnnnnnnnnnnnnnnnnnnnnnnnnnnnnnnnnnnnnnnnnnnnnnnnnnnnnnnnnnnnnnnnnnnnnnnnnnnnnnnnnnnnnnnnnnnnnncaacataaaaatatatgacctaccaccattcacaacagaaaggtgatgaaatcatagcaaaacctaaagttatggacattgcttgtgcctcctcatcataaattctcaaaacatgacttgaatccccattctgcaacgtgcaaattagcaaagtcagatatgcagcgaagccaaagaaacagtgaataactaaaccagaataagacagccagcaattacacacagctcgccccagaagttccgctctttctttcacttccatcatccgcttctgattcctcaagttatgtttatccaaactttctctcaacgattcatcctcttcagctatctgttccctttttctgctcaacataaagcaacacaagctgaatatcctagcgactaaaacaaatgaatggcacaaacagcaactgcatctgaatgttgctaccaaacattgacattacatatcatattcaataagtttaattgcacttttgatcttcctacttttttcaatttcgcaaatttcgtgtctccattttttttttacaaatctgatcctcactatttaattgtgcaattttggttcattccttcgcttaacatcttatatttaacagcaataccaaatgtcagtgtagcaaagtgtctggttagcatttttttttgttaaaagtgccattaactctgtaaaatattatcaatccctctaattccaatgtctgaaaaccttagcacttcaattcacataacaaaacttacgaactagcaattctcctaaccagtgcatgtgaatagacgcgcattccctcggttcaattcgaagcaccacggcgtcgtaattattaacatgcaagatattttagaaacggaatttcgagtggtgaatttgataatgttgattattaaactcttccagagatcgcgttgagatttggcagcgatggagccgcagaggtgatccatctgaacgcagagggattggatccgagtgatgtcgttgttgacggcgaacgacaggtcggaggaggactgctccgactgctccacgcgctcgaggccgtcgcgtatcttcagcaaaagcttcttcgcgctttggtaaatctccgataacgttcctccggctccttgcatggcggtaacagagaaacaaatcgaaacactcactcttaacctcaatttcgaacacgtaaaggttttcaaaaaaaaaaaaaaacaaaacggggcaacccggaatgtaaccgggttcggatacgggtcaagttatcaaggaaaaagaacaggaggaatggaggattaaaattcggacttattttagataggataataaaatatgtttatagtcattctaaagttctctaaatttttaatattttttgacgttaaagttctctaaatttagttttagattttttataaaaaaattattctattttattttttaatttaaaaatatatcattttgatttttgaagtggttataattaatttttttaaatgtattttgaaacctaaaaattaattatttataaattaaaaagaaggaaatatgaaaaaaaattatataaaaaataaaactgaatttataaaattttagaaggataaaaacgtattttaagttagagatataaatactgaattaggtcaggattttctgtccacactattctacccgtataaaaaagagatttttatagcaccgtgtaaatataatgttaattaaaaaaatttataaattttttatttcttaactcattgaaacactttttaaagacaacaccacaaggttcataaagtataaagcaatatttcaatacaataattctaataatacaacaaataaagttgaaatttggaatatttaattattaatattattaactgttaatttttttataatgaatgataaattttattatttaatagtatagttttttaatttacaccatcatttaatcataaatattaatttataaattataaatttattaacttttataataattacattaaaaattaaattaaaaataatttttgttggattgataacataaaaaatttacatgatacctgcctagctattaaaaaaattaaattttatttttaattattggtcaaggattagtaaaagtaaaaccaattaattgaaaaaaaaaaatagatgcatgcgcagtcgtatttaaaagaacataagacaaacaagcaacatagaacaaacaacaccaactcccccattggcatgcagtgttcttggagctgaagaaagttccagaacacaaatcaacgacgtgcttgatattggtgcaagatgttattgtcttgtttagggttttaaatagatataaacaaaaatagtttattgccatgaatatcaaaacacgagtcaacaagaagctttgcataaaatgaaaccttcttaccccaaacaaaaatagaagacgcggatagtttgaaactattcataaggacccaatactccacctaatcattcttgaatctacatttttaattgaagattggattcaactttaccatatcagttggtgtgaaaaatacttgataagaatgaagagtgcaattttgataatatcatttaggaaccgtctttgaaaaagaatcgtatttgaaagttgaaaagaaccgtatttgaaaaagaaccgtatcagttgtatgagtaaaagaaccgtatttgaaaaagcttatttatagtagtgctaacattgggacaacgtaagccgtgaacaacagccatagcctttatgtttgttttaccactataaattaatacttatataaattaatacttaatgcatgaattaatattgtgattaattgtttttcttttcttgtgcatactttttttggtatgtttgttataaaagtagaaagaaaatgaaaggaagacgaaattcatctatgcaagtttggcagtttagtaatatattgaagaatttgtgatgatacaataggttattccccccttttgattattttgatggagagacaagttaaggaaagcatggtacgtaatccccacgccaagcagcatcacatatttccatttggggaataaaatgatgtaccttttgatttgagatgtgtttgtgtattataagtggatgcaaaaaacataaaaaggtacgtaagagaaaaataattataattaatatatgtggtatatatgacatatacgtcaatttttagatgctcaaataatataactcttctcgccttttcattgtttttaataaaatcaaacaaaggaggataaaaataaactcttataacatgaatttgtgtctacgaaattaaaacattttttttctaatttctattaattaaatttaaataatgatgtgttttttttaatattctgtggcacgtgttttaaaaaattgatctatattaaatcaaatnnnnnnnnnnnnnnnnnnnnnnnnnnnnnnnnnnnnnnnnnnnnnnnnnnnnnnnnnnnnnnnnnnnnnnnnnnnnnnnnnnnnnnnnnnnnnnnnnnnnnnnnnnnnnnnnnnnnnnnnnnnnnnnnnnnnnnnnnnnnnnnnnnnnnnnnnnnnnnnnnnnnnnnnnnnnnnnnnnnnnnnnnnnnnnnnnnnnnnnnnnnnnnnnnnnnnnnnnnnnnnnnnnnnnnnnnnnnnnnnnnnnnnnnnnnnnnnnnnnnnnnnnnnnnnnnnnnnnnnnnnnnnnnnnnnnnnnnnnnnnnnnnnnnnnnnnnnnnnnnnnnnnnnnnnnnnnnnnnnnnnnnnnnnnnnnnnnnnnnnnnnnnnnnnnnnnnnnnnnnnnnnnnnnnnnnnnnnnnnnnnnnnnnnnnnnnnnnnnnnnnnnnnnnnnnnnnnnnnnnnnnnnnnnnnnnnnnnnnnnnnnnnnnnnnnnnnnnnnnnnnnnnnnnnnnnnnnnnnnnnnnnnnnnnnnnnnnnnnnnnnnnnnnnnnnnnnnnnnnnnnnnnnnnnnnnnnnnnnnnnnnnnnnnnnnnnnnnnnnnnnnnnnnnnnnnnnnnnnnnnnnnnnnnnnnnnnnnnnnnnnnnnnnnnnnnnnnnnnnnnnnnnnnnnnnnnnnnnnnnnnnnnnnnnnnnnnnnnnnnnnnnnnnnnnnnnnnnnnnnnnnnnnnnnnnnnnnnnnnnnnnnnnnnnnnnnnnnnnnnnnnnnnnnnnnnnnnnnnnnnnnnnnnnnnnnnnnnnnnnnnnnnnnnnnnnnnnnnnnnnnnnnnnnnnnnnnnnnnnnnnnnnnnnnnnnnnnnnnnnnnnnnnnnnnnnnnnnnnnnnnnnnnnnnnnnnnnnnnnnnnnnnnnnnnnnnnnnnnnnnnnnnnnnnnnnnnnnnnnnnnnnnnnnnnaatctaacaaatatcatctttttaaaacacattccatcttttgtatactgtcaattttaaatggaattaatgatcgattggaggacaaaagcgattttttctttgaaaaatagacaaaaagaatttatgtgcaatatacgcttcagcttttaagaatccattatttaattcaatttcttgaaaagtcattggccttggacttttggaggttgctgcagcattcatattgaaatactgtatataggtgagaccagtcttattattcgcgatgaggttcactatagctatacatatatatcacatatgtaaccgtgtgaagcacagaaaaatgataaaaaactctgagagaagcagtgtaagaaaatacaacaaatctgaacttccacgcctgcggtggacacctgaacttcatcaacactttgttgaagctattgaaagtctaggtggaaaacaaagtaagtttaatttccttcatgtaaacaaatatataagatatttataattctagctagggtttatagcaaattatatgtagagtatattaagcatatcccaaaatcagttaatgaaagcatatgttattggatacaaaagtccgtttgatcgaaggaggccagtaatgttgatgatttcgatcaaattctttcattttgatttcttctgatccaaccttagaattgtccttgactccttaactgctttgttgactgacaattttttgcatgtctgagtttcatttctagatttctttgagtttgcttttctaattcttatagcataccacagtatctgagaagagaaaaattaatttgtgtttgcaatataatttataatagcacatatatatgacatgtatacatgggcggatctagcttatgagttgggggcagtgtccctccttaaatttttcaataaattttaatatattcttaatacttatttgcagtgcttattaattatttttagtacttgttatatagtttgcagtacttgttaattatttttatttgtaattcatgcattaacacttgtttataaattgattaaaattcttactcttcattgaaatgagaaatacacagtttaaccatatgcattttgtagaaatattttagtctatattgtaacagctgtttaaagatctcaaactcaatacttatatctaaactaactctcaatgttgtcatcatggtcttttgaaatctcatcgtaaattataataagcttttttcattattttattcaatccagaacagtaatttggtctgactatttgtttgtttctttagatttctgtttataattgtttgttcctttaattttttttcttaaaaaatttcggggacgctgtctttgaacccgacactaattatacagacataaataaatttttttagatctgtcactagtgcctcccttgtttctggatctgccactgtatctgtatatcagaaaattattggttcataatatatatccatagatgaagcatgcgttcgtttcctctctttcttctctagcttttttgtgtgtgtttgaaataacaaatcaaattaaggtgggaaggaaaggaactgtttgtggattgggatgcttaattaagctgcaaatatataaatccagcaaaatggttttgcagaggcaactccaaagcgaattttgcagcagatacgtgtgaaaggactgagaatcgctcacatcaaaagccatcttcaggtatgcatgtaagcatatatatatatatatatatatatatcttactcgtgtggtccaaatcttattattattttttgtgaatggaaaatatacgtatagtagctaatatatatnnnnnnnnnnnnnnnnnnnnnnnnnnnnnnnnnnnnnnnnnnnnnnnnnnnnnnnnnnnnnnnnnnnnnnnnnnnnnnnnnnnnnnnnnnnnnnnnnnnnnnnnnnnnnnnnnnnnnnnnnnnnnnnnnnnnnnnnnnnnnnnnnnnnnnnnnnnnnnnnnnnnnnnnnnnnnnnnnnnnnnnnnnnnnnnnnnnnnnnnnnnnnnnnnnnnnnnnnnnnnnnnnnnnnnnnnnnnnnnnnnnnnnnnnnnnnnnnnnnnnnnnnnnnnnnnnnnnnnnnnnnnnnnnnnnnnnnnnnnnnnnnnnnnnnnnnnnnnnnnnnnnnnnnnnnnnnnnnnnnnnnnnnnnnnnnnnnnnnnnnnnnnnnnnnnnnnnnnnnnnnnnnnnnnnnnnnnnnnnnnnnnnnnnnnnnnnnnnnnnnnnnnnnnnnnnnnnnnnnnnnnnnnnnnnnnnnnnnnnnnnnnnnnnnnnnnnnnnnnnnnnnnnnnnnnnnnnnnnnnnnnnnnnnnnnnnnnnnnnnnnnnnnnnnnnnnnnnnnnnnnnnnnnnnnnnnnnnnnnnnnnnnnnnnnnnnnnnnnnnnnnnnnnnnnnnnnnnnnnnnnnnnnnnnnnnnnnnnnnnnnnnnnnnnnnnnnnnnnnnnnnnnnnnnnnnnnnnnnnnnnnnnnnnnnnnnnnnnnnnnnnnnnnnnnnnnnnnnnnnnnnnnnnnnnnnnnnnnnnnnnnnnnnnnnnnnnnnnnnnnnnnnnnnnnnnnnnnnnnnnnnnnnnnnnnnnnnnnnnnnnnnnnnnnnnnnnnnnnnnnnnnnnnnnnnnnnnnnnnnnnnnnnnnnnnnnnnnnnnnnnnnnnnnnnnnnnnnnnnnnnnnnnnnnnnnnnnnnnnnnnnnnnnnnnnnnnnnnnnnnnnnnnnnnnnnnnnnnnnnnnnnnnnnnnnnnnnnnnnnnnnnnnnnnnnnnnnnnnnnnnnnnnnnnnnnnnnnnnnnnnnnnnnnnnnnnnnnnnnnnnnnnnnnnnnnnnnnnnnnnnnnnnnnnnnnnnnnnnnnnnnnnnnnnnnnnnnnnnnnnnnnnnnnnnnnnnnnnnnnnnnnnnnnnnnnnnnnnnnnnnnnnnnnnnnnnnnnnnnnnnnnnnnnnnnnnnnnnnnnnnnnnnnnnnnnnnnnnnnnnnnnnnnnnnnnnnnnnnnnnnnnnnnnnnnnnnnnnnnnnnnnnnnnnnnnnnnnnnnnnnnnnnnnnnnnnnnnnnnnnnnnnnnnnnnnnnnnnnnnnnnnnnnnnnnnnnnnnnnnnnnnnnnnnnnnnnnnnnnnnnnnnnnnnnnnnnnnnnnnnnnnnnnnnnnnnnnnnnnnnnnnnnnnnnnnnnnnnnnnnnnnnnnnnnnnnnnnnnnnnnnnnnnnnnnnnnnnnnnnnnnnnnnnnnnnnnnnnnnnnnnnnnnnnnnnnnnnnnnnnnnnnnnnnnnnnnnnnnnnnnnnnnnnnnnnnnnnnnnnnnnnnnnnnnnnnnnnnnnnnnnnnnnnnnnnnnnnnnnnnnnnnnnnnnnnnnnnnnnnnnnnnnnnnnnnnnnnnnnnnnnnnnnnnnnnnnnnnnnnnnnnnnnnnnnnnnnnnnnnnnnnnnnnnnnnnnnnnnnnnnnnnnnnnnnnnnnnnnnnnnnnnnnnnnnnnnnnnnnnnnnnnnnnnnnnnnnnnnnnnnnnnnnnnnnnnnnnnnnnnnnnnnnnnnnnnnnnnnnnnnnnnnnnnnnnnnnnnnnnnnnnnnnnnnnnnnnnnnnnnnnnnnnnnnnnnnnnnnnnnnnnnnnnnnnnnnnnnnnnnnnnnnnnnnnnnnnnnnnnnnnnnnnnnnnnnnnnnnnnnnnnnnnnnnnnnnnnnnnnnnnnnnnnnnnnnnnnnnnnnnnnnnnnnnnnnnnnnnnnnnnnnnnnnnnnnnnnnnnnnnnnnnnnnnnnnnnnnnnnnnnnnnnnnnnnnnnnnnnnnnnnnnnnnnnnnnnnnnnnnnnnnnnnnnnnnnnnnnnnnnnnnnnnnnnnnnnnnnnnnnnnnnnnnnnnnnnnnnnnnnnnnnnnnnnnnnnnnnnnnnnnnnnnnnnnnnnnnnnnnnnnnnnnnnnnnnnnnnnnnnnnnnnnnnnnnnnnnnnnnnnnnnnnnnnnnnnnnnnnnnnnnnnnnnnnnnnnnnnnnnnnnnnnnnnnnnnnnnnnnnnnnnnnnnnnnnnnnnnnnnnnnnnnnnnnnnnnnnnnnnnnnnnnnnnnnnnnnnnnnnnnnnnnnnnnnnnnnnnnnnnnnnnnnnnnnnnnnnnnnnnnnnnnnnnnnnnnnnnnnnnnnnnnnnnnnnnnnnnnnnnnnnnnnnnnnnnnnnnnnnnnnnnnnnnnnnnnnnnnnnnnnnnnnnnnnnnnnnnnnnnnnnnnnnnnnnnnnnnnnnnnnnnnnnnnnnnnnnnnnnnnnnnnnnnnnnnnnnnnnnnnnnnnnnnnnnnnnnnnnnnnnnnnnnnnnnnnnnnnnnnnnnnnnnnnnnnnnnnnnnnnnnnnnnnnnnnnnnnnnnnnnnnnnnnnnnnnnnnnnnnnnnnnnnnnnnnnnnnnnnnnnnnnnnnnnnnnnnnnnnnnnnnnnnnnnnnnnnnnnnnnnnnnnnnnnnnnnnnnnnnnnnnnnnnnnnnnnnnnnnnnnnnnnnnnnnnnnnnnnnnnnnnnnnnnnnnnnnnnnnnnnnnnnnnnnnnnnnnnnnnnnnnnnnnnnnnnnnnnnnnnnnnnnnnnnnnnnnnnnnnnnnnnnnnnnnnnnnnnnnnnnnnnnnnnnnnnnnnnnnnnnnnnnnnnnnnnnnnnnnnnnnnnnnnnnnnnnnnnnnnnnnnnnnnnnnnnnnnnnnnnnnnnnnnnnnnnnnnnnnnnnnnnnnnnnnnnnnnnnnnnnnnnnnnnnnnnnnnnnnnnnnnnnnnnnnnnnnnnnnnnnnnnnnnnnnnnnnnnnnnnnnnnnnnnnnnnnnnnnnnnnnnnnnnnnnnnnnnnnnnnnnnnnnnnnnnnnnnnnnnnnnnnnnnnnnnnnnnnnnnnnnnnnnnnnnnnnnnnnnnnnnnnnnnnnnnnnnnnnnnnnnnnnnnnnnnnnnnnnnnnnnnnnnnnnnnnnnnnnnnnnnnnnnnnnnnnnnnnnnnnnnnnnnnnnnnnnnnnnnnnnnnnnnnnnnnnnnnnnnnnnnnnnnnnnnnnnnnnnnnnnnnnnnnnnnnnnnnnnnnnnnnnnnnnnnnnnnnnnnnnnnnnnnnnnnnnnnnnnnnnnnnnnnnnnnnnnnnnnnnnnnnnnnnnnnnnnnnnnnnnnnnnnncggtgatgatcgatcaagttgagttggagcaactttctacttatgattgatcacttgcatatagtttaatgaaaatatcatattaattatgcatcttttcagattcaatcacattatgcatctttactgtaaacaactcagcaccatcatgatcatatgaatcaccattcacacatgtcttattcttaaagaaaacagcataattcttttctaggagttatcacacgcagattgtggtcaatttcaatcctacctagacaacacatttgaaattaatgatactttgaccaagtatcaattgtagcaactcctttacctttttaccttatcaataaagcctccgtttgcaattttaattataatttcttttaactaattatccagatctctaaattaattatatgccttcatggaaggtcatgtgatgagtataatcaccatcaatcaaaactccgtgcttattattggctagctatagaacaaccaattccacaagcaaaggattttctttttgttgtgctatggggttagattagttgataaagtggaacgttgtattctcttgttcaataatttccaaatagaatcaagataaacttccatcgatcgatctagctataataacccacatacacatgataatgttattctcattttataaaatatcagaaattgtaaaagcttaaaatcattttgaacaaattataaatttgtgataagtacatttttccatggaaaagaaagataattagttagcaagctggacgaagtccagtcgtctccacactctccagtactttatctggtttgtgattatacttaaacgataaatgttattatctatatatgtatagtcatattcgacttgagcatgtgatctctacaaaaaaagaggctacacatggtctttgtagcctcttttcaacccaaatctgatatccccaatgttgatcttatatctttgtagagccatagcaaccaaaaactcggttaattatcagagtgatctttgatgatacctcccataccaatgaaaccagttgaaaggcaaagtgattatttttatgtcttaacatttcaaaaatattctagcttgtatatatgttgaacacgtgcaggaaaaaaaaagtgtataacgatcctttgaattgcatactgtttgaactttgtctccatttaatcaatgttaaattgtttaaccatacatttataacatgattcaacccatcacatttaactagtaatttcagtgtgtgaatggtacaagataataatcaaaattaatactacttaaatattttttaatatataaattatattttaagtttataataaatgatttaaatttaaatttaaatataaaattatattacattattgacaatttctaaaaaattaattttggaatgaaaataaaagaaaatagattgaaaatgatagatagttaaaaaattaagtatgcaaataaaaataaaaagaaaggacgtttaagataatggagagaaatttttgagtaattatagagataataagtgaaatacacttttttaattgtgtattttaatttataatataaaaataaannnnnnnnnnnnnnnnnnnnnnnnnnnnnnnnnnnnnnnnnnnnnnnnnnnnnnnnnnnnnnnnnnnnnnnnnnnnnnnnnnnnnnnnnnnnnnnnnnnnnnnnnnnnnnnnnnnnnnnnnnnnnnnnnnnnnnnnnnnnnnnnnnnnnnnnnnnnnnnnnnnnnnnnnnnnnnnnnnnnnnnnnnnnnnnnnnnnnnnnnnnnnnnnnnnnnnnnnnnnnnnnnnnnnnnnnnnnnnnnnnnnnnnnnnnnnnnnnnnnnnnnnnnnnnnnnnnnnnnnnnnnnnnnnnnnnnnnnnnnnnnnnnnnnnnnnnnnnnnnnnnnnnnnnnnnnnnnnnnnnnnnnnnnnnnnnnnnnnnnnnnnnnnnnnnnnnnnnnnnnnnnnnnnnnnnnnnnnnnnnnnnnnnnnnnnnnnnnnnnnnnnnnnnnnnnnnnnnnnnnnnnnnnnnnnnnnnnnnnnnnnnnnnnnnnnnnnnnnnnnnnnnnnnnnnnnnnnnnnnnnnnnnnnnnnnnnnnnnnnnnnnnnnnnnnnnnnnnnnnnnnnnnnnnnnnnnnnnnnnnnnnnnnnnnnnnnnnnnnnnnnnnnnnnnnnnnnnnnnnnnnnnnnnnnnnnnnnnnnnnnnnnnnnnnnnnnnnnnnnnnnnnnnnnnnnnnnnnnnnnnnnnnnnnnnnnnnnnnnnnnnnnnnnnnnnnnnnnnnnnnnnnnnnnnnnnnnnnnnnnnnnnnnnnnnnnnnnnnnnnnnnnnnnnnnnnnnnnnnnnnnnnnnnnnnnnnnnnnnnnnnnnnnnnnnnnnnnnnnnnnnnnnnnnnnnnnnnnnnnnnnnnnnnnnnnnnnnnnnnnnnnnnnnnnnnnnnnnnnnnnnnnnnnnnnnnnnnnnnnnnnnnnnnnnnnnnnnnnnnnnnnnnnnnnnnnnnnnnnnnnnnnnnnnnnnnnnnnnnnnnnnnnnnnnnnnnnnnnnnnnnnnnnnnnnnnnnnnnnnnnnnnnnnnnnnnnnnnnnnnnnnnnnnnnnnnnnnnnnnnnnnnnnnnnnnnnnnnnnnnnnnnnnnnnnnnnnnnnnnnnnnnnnnnnnnnnnnnnnnnnnnnnnnnnnnnnnnnnnnnnnnnnnnnnnnnnnnnnnnnnnnnnnnnnnnnnnnnnnnnnnnnnnnnnnnnnnnnnnnnnnnnnnnnnnnnnnnnnnnnnnnnnnnnnnnnnnnnnnnnnnnnnnnnnnnnnnnnnnnnnnnnnnnnnnnnnnnnnnnnnnnnnnnnnnnnnnnnnnnnnnnnnnnnnnnnnnnnnnnnnnnnnnnnnnnnnnnnnnnnnnnnnnnnnnnnnnnnnnnnnnnnnnnnnnnnnnnnnnnnnnnnnnnnnnnnnnnnnnnnnnnnnnnnnnnnnnnnnnnnnnnnnnnnnnnnnnnnnnnnnnnnnnnnnnnnnnnnnnnnnnnnnnnnnnnnnnnnnnnnnnnnnnnnnnnnnnnnnnnnnnnnnnnnnnnnnnnnnnnnnnnnnnnnnnnnnnnnnnnnnnnnnnnnnnnnnnnnnnnnnnnnnnnnnnnnnnnnnnnnnnccagttttgcatatatacaactattttttcataatcagatatgttttgtttatactaaccacgtggtatgggttatttctaaagccggttatatatgcataactgatatcatcttatattttagatttagatttaactaaacactacaaactaactcagaatgaaatttgtcgtccaatttgtattttggcactttcttggatagatgagaggcacgaatttttctcaataatatgcatacaatgaatttttgttaaaaagaaaatttgcaacacgtgatgaataagaaacggtcaattttacatatttaactatataaaaacagtttgtaatatcacatgcaacatatgagtaggcatactcctatgtcttaacaataataattatcataatcacaattatattttatttattccctaatacacgtgattccttgatttttctacggtaatactcagagatgagcccaaagcagaatgttaagtgtctctcgactccaggaatgcatgccagtttctcccatatatagaagtagaacatacagtgacatttttttacctttctgcggatattcatgttctctgtgatctttatttataatcttcgtcgtcggggttcagatcctctgcgtggtttttacttaagttgttttcattatttctacgttgtacgtgagtttgtacaatatatttaacataattaaaatatatatataaaaagtggaagaacttatcatatgaaaataattatcttatctgataaaaataattaatataaattgttagattaaaataaaagtttaaaattaaaacatcataaattaaaattaaaattttatttaagtatataatctttataaaatttacccaataaaaaataaaatattttgaggtaaattaagcctttaatatatttgattttctttttgataaatattataaagattttatannnnnnnnnnnnnnnnnnnnnnnnnnnnnnnnnnnnnnnnnnnnnnnnnnnnnnnnnnnnnnnnnnnnnnnnnnnnnnnnnnnnnnnnnnnnnnnnnnnnnnnnnnnnnnnnnnnnnnnnnnnnnnnnnnnnnnnnnnnnnnnnnnnnnnnnnnnnnnnnnnnnnnnnnnnnnnnnnnnnnnnnnnnnnnnnnnnnnnnnnnnnnnnnnnnnnnnnnnnnnnnnnnnnnnnnnnnnnnnnnnnnnnnnnnnnnnnnnnnnnnnnnnnnnnnnnnnnnnnnnnnnnnnnnnnnnnnnnnnnnnnnnnnnnnnnnnnnnnnnnnnnnnnnnnnnnnnnnnnnnnnnnnnnnnnnnnnnnnnnnnnnnnnnnnnnnnnnnnnnnnnnnnnnnnnnnnnnnnnnnnnnnnnnnnnnnnnnnnnnnnnnnnnnnnnnnnnnnnnnnnnnnnnnnnnnnnnnnnnnnnnnnnnnnnnnnnnnnnnnnnnnnnnnnnnnnnnnnnnnnnnnnnnnnnnnnnnnnnnnnnnnnnnnnnnnnnnnnnnnnnnnnnnnnnnnnnnnnnnnnnnnnnnnnnnnnnnnnnnnnnnnnnnnnnnnnnnnnnnnnnnnnnnnnnnnnnnnnnnnnnnnnnnnnnnnnnnnnnnnnnnnnnnnnnnnnnnnnnnnnnnnnnnnnnnnnnnnnnnnnnnnnnnnnnnnnnnnnnnnnnnnnnnnnnnnnnnnnnnnnnnnnnnnnnnnnnnnnnnnnnnnnnnnnnnnnnnnnnnnnnnnnnnnnnnnnnnnnnnnnnnnnnnnnnnnnnnnnnnnnnnnnnnnnnnnnnnnnnnnnnnnnnnnnnnnnnnnnnnnnnnnnnnnnnnnnnnnnnnnnnnnnnnnnnnnnnnnnnnnnnnnnnnnnnnnnnnnnnnnnnnnnnnnnnnnnnnnnnnnnnnnnnnnnnnnnnnnnnnnnnnnnnnnnnnnnnnnnnnnnnnnnnnnnnnnnnnnnnnnnnnnnnnnnnnnnnnnnnnnnnnnnnnnnnnnnnnnnnnnnnnnnnnnnnnnnnnnnnnnnnnnnnnnnnnnnnnnnnnnnnnnnnnnnnnnnnnnnnnnnnnnnnnnnnnnnnnnnnnnnnnnnnnnnnnnnnnnnnnnnnnnnnnnnnnnnnnnnnnnnnnnnnnnnnnnnnnnnnnnnnnnnnnnnnnnnnnnnnnnnnnnnnnnnnnnnnnnnnnnnnnnnnnnnnnnnnnnnnnnnnnnnnnnnnnnnnnnnnnnnnnnnnnnnnnnnnnnnnnnnnnnnnnnnnnnnnnnnnnnnnnnnnnnnnnnnnnnnnnnnnnnnnnnnnnnnnnnnnnnnnnnnnnnnnnnnnnnnnnnnnnnnnnnnnnnnnnnnnnnnnnnnnnnnnnnnnnnnnnnnnnnnnnnnnnnnnnnnnnnnnnnnnnnnnnnnnnnnnnnnnnnnnnnnnnnnnnnnnnnnnnnnnnnnnnnnnnnnnnnnnnnnnnnnnnnnnnnnnnnnnnnnnnnnnnnnnnnnnnnnnnnnnnnnnnnnnnnnnnnnnnnnnnnnnnnnnnnnnnnnnnnnnnnnnnnnnnnnnnnnnnnnnnnnnnnnnnnnnnnnnnnnnnnnnnnnnnnnnnnnnnnnnnnnnnnnnnnnnnnnnnnnnnnnnnnnnnnnnnnnnnnnnnnnnnnnnnnnnnnnnnnnnnnnnnnnnnnnnnnnnnnnnnnnnnnnnnnnnnnnnnnnnnnnnnnnnnnnnnnnnnnnnnnnnnnnnnnnnnnnnnnnnnnnnnnnnnnnnnnnnnnnnnnnnnnnnnnnnnnnnnnnnnnnnnnnnnnnnnnnnnnnnnnnnnnnnnnnnnnnnnnnnnnnnnnnnnnnnnnnnnnnnnnnnnnnnnnnnnnnnnnnnnnnnnnnnnnnnnnnnnnnnnnnnnnnnnnaaaatgtccatgtagtttatattccatgcgttgcacttacaaaatttcaaattaagaacttagcttacttcaaattgttagatggggcaggtggaatggtgtttgcttggcacataaaattttagtcccaattaacttagaaaataaagactaactttaatttatatgtttttttcccaacaaaatgcttttttatatgtttatttcagacataagaaagtaaatattgaatacagcgttttaaatttaacatatcgatcaaagcggaaaatacgctttgtatacaaatattgcatgatctaactaattacattctttattcttgattaaataaacgaatttgaatacagcgtattaaatttaacatttttattaaaaaagaagaagagagaagaatataaatgttcattacatgttattcacagatatattttttgttcaaaatatatattctggaaccttgcaggaatcacagtcaagtggactcttgcttagtgatgatgtgtcaaatgaagaagaaaattttgctgatctatctttctcctttagcacgcctctgatgtccattattcaaagtgagaatagcaaagagataatgcgtttttcgtcatcaaatgcagctgctaatcattccgttgattctatttctacgccgtcttttgcaaacaattacataaacttagacctaacaatctgaatatgtgtattaattctttttatttacttacacgtgcgtaacactagttttaattacatgttaactttttaggcaaggacttacaattaatagttagttaattattgtattctttattacagtgttaggcttgttaggcgtaataaaaggttctctttctttttctataacaataatgatacaagaatttaaaccatgcttattaattaatggaaattaaaatctaacggtgatgatcgatcaagttgagttggagcaactttctacttatgattgatcacttgcatatagtttaatgaaaatatcatattaattatgcatcttttcagattcaatcacattatgcatcttnnnnnnnnnnnnnnnnnnnnnnnnnnnnnnnnnnnnnnnnnnnnnnnnnnnnnnnnnnnnnnnnnnnnnnnnnnnnnnnnnnnnnnnnnnnnnnnnnnnnnnnnnnnnnnnnnnnnnnnnnnnnnnnnnnnnnnnnnnnnnnnnnnnnnnnnnnnnnnnnnnnnnnnnnnnnnnnnnnnnnnnnnnnnnnnnnnnnnnnnnnnnnnnnnnnnnnnnnnnnnnnnnnnnnnnnnnnnnnnnnnnnnnnnnnnnnnnnnnnnnnnnnnnnnnnnnnnnnnnnnnnnnnnnnnnnnnnnnnnnnnnnnnnnnnnnnnnnnnnnnnnnnnnnnnnnnnnnnnnnnnnnnnnnnnnnnnnnnnnnnnnnnnnnnnnnnnnnnnnnnnnnnnnnnnnnnnnnnnnnnnnnnnnnnnnnnnnnnnnnnnnnnnnnnnnnnnnnnnnnnnnnnnnnnnnnnnnnnnnnnnnnnnnnnnnnnnnnnnnnnnnnnnnnnnnnnnnnnnnnnnnnnnnnnnnnnnnnnnnnnnnnnnnnnnnnnnnnnnnnnnnnnnnnnnnnnnnnnnnnnnnnnnnnnnnnnnnnnnnnnnnnnnnnnnnnnnnnnnnnnnnnnnnnnnnnnnnnnnnnnnnnnnnnnnnnnnnnnnnnnnnnnnnnnnnnnnnnnnnnnnnnnnnnnnnnnnnnnnnnnnnnnnnnnnnnnnnnnnnnnnnnnnnnnnnnnnnnnnnnnnnnnnnnnnnnnnnnnnnnnnnnnnnnnnnnnnnnnnnnnnnnnnnnnnnnnnnnnnnnnnnnnnnnnnnnnnnnnnnnnnnnnnnnnnnnnnnnnnnnnnnnnnnnnnnnnnnnnnnnnnnnnnnnnnnnnnnnnnnnnnnnnnnnnnnnnnnnnnnnnnnnnnnnnnnnnnnnnnnnnnnnnnnnnnnnnnnnnnnnnnnnnnnnnnnnnnnnnnnnnnnnnnnnnnnnnnnnnnnnnnnnnnnnnnnnnnnnnnnnnnnnnnnnnnnnnnnnnnnnnnnnnnnnnnnnnnnnnnnnnnnnnnnnnnnnnnnnnnnnnnnnnnnnnnnnnnnnnnnnnnnnnnnnnnnnnnnnnnnnnnnnnnnnnnnnnnnnnnnnnnnnnnnnnnnnnnnnnnnnnnnnnnnnnnnnnnnnnnnnnnnnnnnnnnnnnnnnnnnnnnnnnnnnnnnnnnnnnnnnnnnnnnnnnnnnnnnnnnnnnnnnnnnnnnnnnnnnnnnnnnnnnnnnnnnnnnnnnnnnnnnnnnnnnnnnnnnnnnnnnnnnnnnnnnnnnnnnnnnnnnnnnnnnnnnnnnnnnnnnnnnnnnnnnnnnnnnnnnnnnnnnnnnnnnnnnnnnnnnnnnnnnnnnnnnnnnnnnnnnnnnnnnnnnnnnnnnnnnnnnnnnnnnnnnnnnnnnnnnnnnnnnnnnnnnnnnnnnnnnnnnnnnnnnnnnnnnnnnnnnnnnnnnnnnnnnnnnnnnnnnnnnnnnnnnnnnnnnnnnnnnnnnnnnnnnnnnnnnnnnnnnnnnnnnnnnnnnnnnnnnnnnnnnnnnnnnnnnnnnnnnnnnnnnnnnnnnnnnnnnnnnnnnnnnnnnnnnnnnnnnnnnnnnnnnnnnnnnnnnnnnnnnnnnnnnnnnnnnnnnnnnnnnnnnnnnnnnnnnnnnnnnnnnnnnnnnnnnnnnnnnnnnnnnnnnnnnnnnnnnnnnnnnnnnnnnnnnnnnnnnnnnnnnnnnnnnnnnnnnnnnnnnnnnnnnnnnnnnnnnnnnnnnnnnnnnnntaaaaaaaaaaaaaaacattttattgctccttagaaaaacaatcgaacgtcttcctgctcctaaatcctaattacgctagatattataattatccattcgtcccctataggctaaactttactcaccttaaaaaagtaatcttttttgataaaatcgatggattaggattaaatttttttccttaagagggagaaagaggccacgtgtacttatttggatatttattatccatcattgcatggtacatttgctagttgctaccacatataatacttcatttcctcggcaaaccagaaattaaataccgtggtgtcgatgatcttgttatatatcacatgaagatttaccaaaaattcccgaatcctatgataatttctcctgccaaacaaatggaacgaaatactttaaaattaaactaataaatgtacattaataggaagaaaaaaaaggcagaatgaacatctttgtacaagttcggatccacagggaatccaaacactatcaattgtttctgttctgttacatctttcactacacatcattgacccgtatatcatttttctaaaataatatcactgagcagaattttcactgcctcttcgccaacgtcttccgcaaccctttgataatttttgaaaaccaaatcaagttcataactgatagcgccagcggcacaacaataactaacacttgtccaaacgcgtgcatctgctcaatctgttgaatgaataattgaacaatgacgtgagatcctaagctttataaagtagactttgcttgaccagaaattagaaagaaataaaccatttttaagactcccatgcaagactaaagtcttaaaacatttattacaaaatgaagacattacacattctccttgatgcacgtaaaatgcaacagtcgttattaacaactctcatacctcacaataaaccactccctatccctatcaccatgggcggatccagaaaaaaaattaagggggaacactagtggcgggggttcgggagtagctcccccgaaattattttttttaaggaacaaaccattgtaataagagtgtgaaaaatggtaccattcaaaaaggaaaaaaaatgataaaattagcgtgtgaccaatgcttaaaaataacaaaagtgtgaccactgcattcatgaaattacaaacatacaaaaccatactcactcctctcctatttttcatcttttttattattcttttttcatacttttcgttttcccctagtataaacatctaaactattttttattttactttattttattattataaaaaattacccaaaaaataacatttttaaatgtagatccgcctctgcctaagtaaacactggacttcttgaaaatttaagggggggcactgccccctcaatccaatacatccatccgcccctgcctatcacatccaggtgtatttttaacaattttctgggatgaatatttcatgactaactagttgacatgatagatctactatgacaacatttggctaagcaaacaaggagtcaaattgtaaatttattggaacaagttctaccaattcagtcttattatgtagaggtaatggtatgtaagtatatacaagcgtaaatggacagagactaccacactaaggatgagtttggttgtgtggaatggaagggaaggggagaattgagaagaaatatttaaattaaagtagtgtagaaaaggtgtgggacccacacaaaattttaaaaatttcttcacaatttgaacataaccaaaccaagggaattgctgatccatgcacccaaacacacatacatgcaagttcaaaaagtgatcttgttggcaacaaatacatccaatagaagggcaacaaaacattattagccatcttaaaaggccaaaaattcaatattaagatctgcttgctgcaaagcaccacataccagacaattcttaaattcagtcagtagttattacctggtcaaagtgcaggtagacatggtaacacatgtaaacaaacaaaagtattctggcaacctgcaggaagaccatttcagttagcatgtccaagatggcacagatgagattgctatatacttaatatgatatgcaattcacaatgattccacaaataacaccataaatgagtgacaatatatttcaaactgcaatgacttgacccaccagccaagcaatgaatatgacaaccccattgatgagataagcttttgacttcttcattccagctgcatcaagataccttcacaaacacagtatgtgcattagtaaataaattacatgacatatagagtgcatatttaggtgcaagattaccatctcaagttgatcccaggagttgttgtctcagagatcaggaccatgtatgtgtatagctgaccctccccgctcaacattgaaaacgctactgctactaaagaaagcaaatgatgaatcacctgaatcaatgttaatattaagtcatgttaaattcatatttacaaccaaatagggtgaaaaaggaaggaaaccaaactcttgccataatcaagtggaatatcttaaaattgaataagagagttcagatgatcaaggttagattggtttaaactatgcaagtcaaaagatatgatccttacatactcatatccaccaagagaaggaaaaaaccaaaatatcatcccaaggtcagcgatgaagtaaccgacagacacctgtcacattaaaaattaaaacataatacaaatttcatgaccagataaaaacaaaaatgtgttgcagctcataatatgatgatctataaacgtaagatatatactttttgttatcattggatgtatcagtaaaatcaagggaataacaagtccaaatttgttgtaaatcatgactagcaaaatatagaagaactactaaaaggaaattagcagaagatatagatactaagaaaaatgagaagagtgatttagttaatatattatgccgatattatttgttaacatgctcagacaatatggctacacacacataaagaaatgatgataaattggtaacatttcagtctaacttattcaatctagggtccaaccaatgccaattgcattaatcacacactctggatcaacatatggttcacgctaataaaaaattgtcatttatgtactttaattatcaaatagattacattactctaggaagtatgcaggtctgaagagcaattgcagaacgctttaaagttaaaaaagtggacaatgtaaaacatatgggaatctatttatcttgcttttctttcttaagcaaatctttcagaagaaaaaacaaattatgaaaatcaagcagcaagttaaatgcagctgaaggcaaatagcatttcatcactagtatcctactgatctagtcttgggtgtttgcattgatcattatacaaaaaaccttcctagtagtggcttcttctaagaaacattcgtaataccttaaatctccaagctggattccattcatggactacaaaagacaatgctctacttcatggaagttaacattacctacttgcttatcgtatatacttactcatcaacaattttcataaaatattttttttcttttacccaggcagcctatgatttcatctaggtctgtcttgctttcataacaaggcatgggtgttctccaaatttaacttccagtatatctagggattcagactcaacttacaatatctccatcataaaaatgtcaaaccatgaaaagcccaccaaaatctccaaaataaatcttatgtatattatctcatactttttgaactccactacatcatggcattcacgacaatatcagaaaatatatatggcaaaaagtcagtgatcaagatgatgctaataatatctaaccccacttggcagaatcatagattaaaataaaaatgaactccatgatccatcccttcattctattggttaggtgactagatttattgacatgtcctccgcagtgaagtgagacaattatttgtgattattcattattgtttatcataatggtgacctgcagagataaatcacaaagaggaagagaaaagggaaacaaactgtaaagagtccacatcattcttacccccagagcaaaggtagatgatgaagagcttcgaaatgtaataagttcggacgactggttgtcagaatatagatttgagcaaaacaccaagtacaacgacatagttgttatgaaaatagcatgaattgttgacatagaactgcacaaataataggggaaaaaatgtaaacatattatcttgttagaaacaaattaagaaacattccaccaaatgaaaacatcccctcaccgattattccactcaacacgttggattctagtgaggctggaatagctcttaaagtgaacagtgctaaaaagctgagtaagatcatagacctggaaaaacagtaaatatttagagataattgtaaaataaaaataataaatagcagtaatcttaaaagctcctaagtcaggtgaaatactttagaaaatagaatgaggataaaatttaatacaacacaccatcttgcaagcaaaaataccaccaataatagaagtatatggaatcagagggtctgctaataaatattccttcacgaacaaattagcccggttctggtaggatttgaatttcatcatttctttagaagctaacattgcaacaccaccccttgaatgagaaatcctttgaagattttacaacctttctgcctttacacttgtctcctgttatatgaataaatacaagtttgaagacaagatattcaaaaactaaaagccaaagatgaatccttatttggtttctctatgaaaatgactcatgagttaaggataacaataattatcaaagaagttacattaattgagggaaagagacttaatatattaagtatatgtctattgtgtgccaaagagacaaggacatcagataattaatcaaaactttcttatggagaagccaggatgctcatatataaggaaagaagaaatacaaggaatttggaggatagggtatcctccttgcagaaaaggatagtccacatccaaaattaaataaatctgctaatatctctcattcaaagcaatcttatgccaaatcatgtctaaaaaggtaagaacatccaacagaaaattcaaacattcagcattcaacaaagacaccaaaaattttgttcgcatacaagtcgaattgccataacactcttcctctttactccatccaaaacctctgaaataaatcaacaagacaagaaatgcttcatattctgtgcacatgcatacccaagtttcacccaaaggtcgattccaacttccaaatgttgctatccagcaatgttaataacaactaacaacactaccgcagatccaccaaccaaaccaaacatatgctaaattcaattattaatacttacaggaaataaattatcaatccggagagggtaagagaaaaatgatataccaattcgctttagacctaaatatcagtaataaaaaatttatccattaatatcaagcctaaccagttaccactccagaaaatcaaataagttactactaagattaatgtgaagctgacaaaagacagtaaaaaataataaaaaaatgggggaaaatcttaaatcatttaagaattgaagttcaccaaatgcaattcaaatagggctctaattttccacaccaaaccagcacccaaccaagttcatataatcgcaaccacttgacttgatcaagtgggattgaaatccttgcggatcttcaaagcaccaactatttgtacttctcccacacagagaactcattggcgtaagttcagggacagcaacaaacaaacaaacaaaaaaattacaccaaatttcagagagtaaaatctcttcacgaactaaaaaaaaaaaaaaaacgaatcgttaaagctttagcagcactcgagacaaaaaggaacgaagtgaagtaccgaggaagggcgaaaaggcgtgagtttggcgaagggaagaaatgcgatcggttgggtggtgagagcgtttgtaaggaaatttggagttgaaagtggtgaaggtggtgggatcatgctgcatgagttatgttgattgaagaaatgggaaggggaaatttgaacactgaaaaccctaacatgttttgattggattgggattgggattggaagaggtgaggctaaggaggaagatggcagataggaagaaatatggttggcaccccgcgtcgtttatacactttctcaattcttcttccttttttttttttaaataaataaaaaatgaaaaagaaaaattgttccactcccactcgtagctaactcagtattcaatcgctttcttcaatcatttcaattattacgtgtcaaatatggagtagatcttttttaaattaaattaaatctatctcatttattgtgttgggtactgggttccaatttcatgtttctagcttgtttttaacggtgatgtataaaattaagtcacgtatcaggaatttaattaacttaataaaataaaatgcatgaattatattataacttttttactactctttattattcttacggataaaaaaatttataaatcgttattaatatgagttttagttcaccaaaatgatgatgatgataattactttatattagtgtataatttattttttcttctagtaatttttgataaataaaaatgtttttgaaattctgaaaattcgataattggctgattatttatttaatgaataaaatgttaaatatttttatatttttgaggtgttaaatacatttattttttaatgaaatgttgggataattaacaagaagatactgtgtacaacattagtcttatttataatagggttggtttggagatattttcaatttaaaattaaaactaaaaatgacagattcggtttaaagatttttcaagtttagtatcaacttaaattaagaagtcagttctcaactttgcgagcttaggttgtttgattaattgaataaacagacaactactgatatgttttcaggtactgtaagaattatttatggacgaaactttcaatttaataaggctaactacttaattcaatttcatttaatgtactcctaaaaaaattcattttgcacattttttttggcatttataaaacgttgtttatattgcattgtatcatgaactcacaaatgctaacatgccccaagtaaagcattggttgggtgaattcagagtaagttccagcaaaaagttaataactaataatttaagatattggaatttatttaaaatattaacaagagttaataattaatcttttaagatactagatttattaaaaattgaattgtttcaatagattttttttttattgcttgatagatgtcttttatacacacagacatgtagatcgaattcttaaacatatacttaggaacatgattatatgtcaactatgtcatatgtaaataaaaaatattgattattaagtaaacaaaagcataaaacattttattgaattttttttatttttattaaaatataacattattttattattttacttgtagtgacatagcaagtaaaatttcaaatctattcctttataatacatttttcataaatataaaatccatttaaaatttgaagcatttatttacgtataaagataatgtaactattcagtaaccgttgttgaaagtgagatatgtgtgattgaaactaaaaaacgagagttatgctgcatcggttaacggggtgttgagtgtttgagtgcagaaaactcttggaagttgcggaaaatggggaaatctgttgttggaagaaaacgagggttgtgaggggacaagatttaatttcatgcttcctagggcacaaaacgtcttgctcaagcaagctatgtgctatatactatataatcgattaccttatcatgacaattaattgccttatcatgtgaaccagtgaataatgatgttcatggtaattaagcctacacgtcgtaaaaaaaaaaaacccgctcatgtcacgctttttattattatcattattatgtgtacacagttttcatgaatcaagttaatttcacgttgaaattgtgaagtaatcatctctatatatgtgataaaaatgaaagtttcaaatctgcacttagtggaaaaaattggtgttataaacaacagtctgtgactgtgatactagcatccaagtcattagtgtacataaccatcatcaattaatcaaggttttctcctatttggaacttggggagcatatagtcttagatgttcctcttaatgatatatgaaggatgaacattagctaaaaataattttaaataatttatttgtttttatctttttttcttctatcacatcataaatcttataatatttatattatttttttctttccatgtatcttatagcataataagtgtcaataaatcatttttctaacaacaaatctaacacagataacattcccattaataattaataactaataataataaagataaaactgacacaaggcacatatagtccatagaaataaaaagtctaaacctaaattaaaacaataacttatatgtcaagacagagagaacaaataaggtattgtttcaatttggtagcagcagctatatagtaaggtaaacttgaacatcatacttatataccagaagtgcttaattaaatgctaacacaatgcaatgaaatttgatttgatggaaatatactccagttattggtcccctccacatgctttagcatgcaacagagtatgcttgcaaacaacaacttcgaacactgaaaaagagatttcttgagatcagtcccacttcttgcaggcctctaatctggattccccacttagctctcttttcaaattgataagcacatggataacaaagacaaaatatgctttcacatgatcaagccccaaaattatgatttatttatggcatcagataaaatattgtgctatagcacaaaaagaaactgtattatatcaacctacactagtatagtacacgtgctttaacacatgtcatgtttgttgttatgaacatttgaaaaacactcatatatactaatccaacagcaaaagtggtggtggataattgaaaaattagaagcaacaaattataaccgtgaaaaaataatcgatgtagcatcaacacaaatatatccaacatacacttaatcgaaggatcactacatgaataataaaataggaagaatgctatgggaataagtttcatatataccaaaaacgatgtgtggctacaagcccgcatgctacaactattttattttatttgaaacagacatgctacaactaattgaatgtgtaaatattacttataaaagtaatgactagtatattacacacaaaaagtgtacatgtcctgcaaacaataaaataataaaataaatatatattaaattccaattacatatattttcaaacaagactaaatattaatgaacttattttgcgtaatcattgtgtttataaacataaatttttactaacaaaacctttgaattgataatttttattcaatatatgaagtttataaaaatcatgaaaatttaaaactgatcaacattttaaataattaattttacttttatgtataatattttgaaaataaatattaaatatgaaattatatttatataagtgtttcattttttaaaatttaatatatattttcatcaaaacaatgtcctgcaatttcactattaaatttacatttgtttgaaaaaactattatgtttaataaaattctgttttaaacacctatcacatacttcatctagtcgttattagaaggttgaaattaaaaatatagcttaattttttttataaggtgcaatctgaaatttttggtgaattaattattttttttacaaaaatatcttctattaaagtccgttctaaaacgacatggtatggagagaaacacaattaattaatgtgtgttagttttgttcataagaataattttatgagagaaaaaaatagtattttaagacaaatttaacgctcttaggtaatttaatcaaattacttaannnnnnnnnnnnnnnnnnnnnnnnnnnnnnnnnnnnnnnnnnnnnnnnnnnnnnnnnnnnnnnnnnnnnnnnnnnnnnnnnnnnnnnnnnnnnnnnnnnnnnnnnnnnnnnnnnnnnnnnnnnnnnnnnnnnnnnnnnnnnnnnnnnnnnnnnnnnnnnnnnnnnnnnnnnnnnnnnnnnnnnnnnnnnnnnnnnnnnnnnnnnnnnnnnnnnnnnnnnnnnnnnnnnnnnnnnnnnnnnnnnnnnnnnnnnnnnnnnnnnnnnnnnnnnnnnnnnnnnnnnnnnnnnnnnnnnnnnnnnnnnnnnnnnnnnnnnnnnnnnnnnnnnnnnnnnnnnnnnnnnnnnnnnnnnnnnnnnnnnnnnnnnnnnnnnnnnnnnnnnnnnnnnnnnnnnnnnnnnnattatacatttattttttataaaaccaatattttacttagtttctttcaaagacggaatgcataaattaattttaaaagagaaaacttgatttattttataaatatttaagagagatgttcactttaggaattaggaggttaaatagtagttatattaaagggaaatgctaatcagtattactaagataatagttaaagaaaagaaagattttttattgacatacgtaaaattatattaatcataatttttttaaaacttttatatgattatttttattaataatatcttattcatgtagttatttgatgaatttcttatggaaataatattagaagtatacttagcaagtgaatctctgtgactttgattagtgaattttcaatgacgaaaaaatcagaaattctagaacattaccagcaatgatgagaatagaaggataagcatccaaatatcgaattggtgtgtggtgtggtgtggctctttgaaggaagaaaatggcaaaattagagtcagcagcggaaaaagcacgttggcaaagtccattgcctcatttcatcaaagactgcaccctacccttgctgctaacctcacccgcctcacttcctcaacgacctctcatacgaagccatctgccaaatcgcctccacgcagctccgcctcgccctcagcgtcctcctcgactccccgctcctccgtacaagccggggacgtgggaggaacgggagaagcttctggaagggtacggagggtgtacggagtacgacgttggtcacgtgccaaagctcgtcgactcgtcgtcgatacaacctccaatgtccccttggaagatatgtgttccgctgcgttggagtttatcttcgctcaccctgctaagccacctgcgattagccacgtggctttttcatcgttcgttctgataatattaatatcttctttcttctatgatcgctggtagcatatataggataggattgtaaacattataaaaaaaaactattgaaattctacttacttgttaaatatatatactccgttgtagtatttgtttatttagttaaaaacaaaaataacttttaatctctacaaagatatctattatctaataatcacttggttcttataaataaaaaggattttgtaaattatttgataggaaagaagcaaaatataaaaaaaaaactttatttctcttccttaaaaagataaatattcataataaagaaaataaacataaaagtaaaaaaaaaatagttttcctttttttcctcttttctctctcccaaccaaaatggacagattactataacagtgaatttcacattctttttattcattctttcccccctcaataccaagcaaaagaacaattgaaattaatgtcttctttcatcatactcgtatttgtttcgctggttctcacttgtatcaaacaaataataataagattgaacctaatctttatgcatctattccaatttctaccattaacttaactgtttatttatatgtgatgaatttataagaactcatatatatactaagtattttaaaaccttaactattcattcaaggaataaagtattaagatttttaagttatcaaaatattaaatgttcttttatttgtttcaaatgataattaagaaggcttcaggatgatgcaccatttcttttttattcttcagaaaaatctataccaaccaccttagtggcatgaaatgtgacagcagcgacaggaaatttaatgaaaaataaataagtactttatgctttacataaatgctttacatgtttggagaggtataaaaaaagaacaaaacaatatacataaaaatcgaaatttagaaattatctcaattttaagaaccaagattcgaattgagttcaagccttcaaggattctccaacatatgtgtgtatatatatgtttgacatatgtttagattttgtacgatcaataacgattaaatattgtaaaaaaaaaatgtgaaaactgaaaccaacccctcctagaatttgatacacctaaattccaatcgaacaatgatgctatctgcacgtaattaaatgtgttcctttgtgttggagaatctgcaattttcaatattcctttttgaaattgttattagcaatttagcacgttcattttaggatgttctggaacgtagaactgcactgaaaatctgaaatccttatccaaaacaaacaaatttacgttggacccacttgccttcagaaagctgatgatacctacattactgtagtctgtagcagtaactaaagtttttactatccctttagcagagcgatttcctattttggccaatacaatatttcaatattctatcgcatctttttttccaaactttgtttctataattccacactctcataactcggaatatagcaccatttgccgaaaagagaaaaagataaatgcgattaatgtgcatcctaatcctttgcgttttgtataagttacaggtgcaatgcattaggaaattggtataaaaaaaaaactatcacacaattttcatcttattaaaaacagcaccttgaacatgacaaaatttaaatgcagcttaataaataattagacaatggtgaacattcaaaatccaactcatttaaattttaatgtaaaatagaatatttaagtgttgttttcaattaaatttttattataaataaaattttcattaaacataattataaattattgagataaaacttcgatttgaaaaataaattaacacatacaaacataaattattaaaataaaactccaattttaataaaaaaaataacacaaaaatacacttgacatataaatttgtcgttttgaatatgaattaaatgaacaaacaaagatgtccgagagattaagtgattcacgaatgtaataactttttatgcttaaattccctaactactttttcctcctccaatcacatgttttgtatatgcattaataattgtgctgaaacatgaaaactagggacatggtcacaatatttattaaactttgggtcatgctaagaagacgagaaatttgagagagaataagaaaaagagaaaaagacagaacaatcaacgtgtagtttgcgttttatttctcttcaagaacacagggagtctcggttaccgagcatcatctctctctgtgttttcccatatcttctctttccagtcgttggtcaacctttgttcattggttctctttctctttccatttcaagtcttcgcttctttggttcaaaggacttgagcattattgatgttaaactagccatcttcttcagtttcttcttcttcttcttcttcagcgttttcaagcctcttccaagagtctcttactcaagattcgcccctggttcattctctcaagctgctgctgagttcatcttccctcttaagtcttaactcaaagggtaacaccctgtatgtaatatttattcttcttttgctcttaacatctttctcatgtcagttaagttctaaaagttcaaacttttttgctctcatgcctcaatttatttgatggatgatccccagatgaaaaatcatctcagtttttgcttctgggaatctgagttttgttgcttgacttgcaagtgactttggtcttgtggttggcgaaacagtcacctttctcaattttgcttatttaatttgagcttagtttgtttggttatagattgtgttagctagcttttcaatttgagatgggtacttaaaggggtttaatttcttcttttgcttctaaatttagtcaaacagtgctttgactcaattggaatctcctatatttggggtcatggataactcatatgattcatcatcatccttgagtttcgtatcatctcacctgtcacatggttctagtaatcacaacgtgtcttccaccaccagcaatgagcatggggcaaatattgaaattttgagtctgaataagctcagtggaagccttgagaagctattgattgaggctgactatggttatagtgatgctgagattcttgttgaggacatccctgtgggtatacatcgctgtatattggcgtcgcgtagtccgttttttcatgagctttttaagaaagggactgatggatcagggaaggaaggaaagccaaggtatctcatgtcagatttggtgccttatggcacagttggatatgaagctttccaagtgttcttgtactatctgtatactggaaggctaaaggcttcaccaacagaagagacaacatgtgttgatgaaacatgtatccatgtagcatgccgccctgctatcaattatgcattagagctgatgtatgcttctgccacttttcagatgaaagagctggtattactttttcaggtattttggttgtcatttttagttcttcttcctttatcttattactaatttttgcgtgaaaaagaagaaatgtgaaaaagtcagagcaattctacaaaatcattctgggctgaataacatagaaatactaccagttaaagtttttttttttttttttttnnnnnnnnnnnnnnnnnnnnnnnnnnnnnnnnnnnnnnnnnnnnnnnnnnnnnnnnnnnnnnnnnnnnnnnnnnnnnnnnnnnnnnnnnnnnnnnnnnnnnnnnnnnnnnnnnnnnnnnnnnnnnnnnnnnnnnnnnnnnnnnnnnnnnnnnnnnnnnnnnnnnnnnnnnnnnnnnnnnnnnnnnnnnnnnnnnnnnnnnnnnnnnnnnnnnnnnnnnnnnnnnnnnnnnnnnnnnnnnnnnnnnnnnnnnnnnnnnnnnnnnnnnnnnnnnnnnnnnnnnnnnnnnnnnnnnnnnnnnnnnnnnnnnnnnnnnnnnnnnnnnnnnnnnnnnnnnnnnnnnnnnnnnnnnnnnnnnnnnnnnnnnnnnnnnnnnnnnnnnnnnnnnnnnnnnnnnnnnnnnnnnnnnnnnnnnnttttttttatcggcaaatatattagttgttagaatgcaagttttattagtagaggggatcgacctgtgacctttcctccacttcccttctcccttaaccattcaacccaccttatatctccgtcctacccattaaagtatcccaatgtttacctaagactaaaagcagataaacattttacatttggcaagttttggaaattgtttccaacttacatgtgtgtctttctgaagtgttcaacactttatgtgcctagtgaacaaattttggaatagatgtatacctagcctaacttcacacacatacacttgtcactacattatgtacctttgtccactaagctcttctgattttccactgctgcttttaacttctaacttatatcttgaggatgatattttgatcctatattacttctatgtttctctattattaccaaaaaaaaaaaaagacagacatcttttgcttaacaaatctaatgtaaatatctctttactgatgcagcggcatctcctaaattttattgagaaagctgttgtggaagatgtcatttctattcttatggctgctttcaactaccaactagaccagcttctctctcagtgcattcagagagtagcaaggtctgactttgacaacatatctttggaaaaagagctccctcatgaagttgtgactgaaatcaaatcactccgactcccatttcagccagaatccacacctaatgcaatggaagtggagtccttgaatgaaaagaatatcaggagaatccacaaggcattggactctgatgatgttgagctactgaagcttcttctaaatgagtctagtgtcactctagatgatgcatatgccctgcactatgcttgtgcctatagcgattctaaggttattcaagaagttcttagtctaggcatggctgatattcttcgtagaaattcccgaggatacacagttcttcatgtggctgcaaggcgaaaggatccatccattttggtagcactactgaataaaggggcacgtgcatcagataccactccagatggacaaaccgctcttgcaatttgtcagaggttgacaagatgcaaggattatcatgagaaaacagtgcagtgtaaggaatctaacaaggacaggctctgtgttgatgtcctggagagggagatgagaagaaattctatgattgtgaatatgtctgtttcatcacagttaacagctgatgatttgcacatgagactggattaccttgaagatagaggtagggctttctcttgtctaggtcactttgtttctatgaatattgggttttggacctcttagttgagttggaaatttgaaagggtaaaatccagaaaattattttccattgttcagaaaaatacatagattgatacaaatatataaactctaatgagactattccaaatcgggaataaatctgtgcacaatcaaatcctcctaattacagtagtaatggtaactttttaattacaaatgcatagttaataccagtaagctgttattttactttaggaatatgcatgcatcataaccacaacaaaactatatttgcatgatgcttttaaatttggaagcctatggacatgaaattaacatgctccatatgttgcagttgcatttgctcggctgttgtttcctgctgaggctagggtagccattgagaatgctgaagcagattcatcatcgctgtacgcatattcatcggctttgaagggcaaaaatggcaacccgaaagaagtagatctaaatgaatctccctctgctcgaaccaaaaaactccagttaagattgcatgcccttatgaaaacaggtatgtccaagacaattttgaaatagcatccttatagaggttatgcatctgtggaatgtggatatgatttattctattaacaccaagtctagcttgcttgtatgttgccttggttggaacatgccacaattgtgaaaatctcagaattacatgatgcaagccaacaaaaaagtaaaaataaaactttccacttacacagatggagtgtagtaactactaattaacaaagaaactttttatcacttgtagtacttcttattttattttatataagcaaagtttatttaaaaacacagtacaagggatactctaactcatgtacaagagtgttataagaccaaatcagagggataagagacaagttataggatcagtacaccaatcagaaaaggagcattgaacactacttattttttccttaaagcatgtctacgatccaaccttaatcaattttagatttctagtgtgctagtgaagttaaaaggaaaccctgaaacaaaatattgtttctcataatctaagtagaccatatcatagcgtaccaaataagatatcaaatggaacttaaaactaaccatgcatttgtagtactttacagcttaacacaaatggaaatgaatttaatgcaacttgcaattgtagaggaaaagaatgatggtggtttaatgttgttattaaaactctgagaatgctttttgaattatgtacagttgagaatggtaggcgcttctttccccattgctctgaagttcttgataagtttctggaagatgacgaaatgccagatgttttcttcctagagaagggaagtgaagacgagcagagaatcaagaaagcacgcttcatggagcttaaagatgatgtgcagaaggcatttcacaaggatatggctgaaaataaccattctagtttttcatctgcggtgtcttcctcatcttcctcaactcgtagggaaggtcttaaccatagagtaaggagaaaatgaagtccatgttcttctatgtagagtgttgcaacttgcaagtagaagctgtggaatatttagaaaaaataagatggaatgttaaattagggggtttttctaatgaacatgggagatttttactagcttgatttagtttcttatagttgttgtaccaagagaagaagaaaaagaaaagaagacgaattggcttctagtaatatctttgttccttttcgaagacccaaaagtgttttacattgttatctgattatagattgttatataattgaaatttttacctcctctaataattactttaaagatcatatgcagactttttgaaagtcatttttaattgattatccttgctaaattgtatctatatccattgtacaccaaaataattgtatatattgaaaacataaaaaaactaaactcttgtttcagttgcaacaaggagtaacccttatcttcaacaaagtaatggaaggtttaatgtggacttattgctaggttgagttttgtttagaatattttttagaattgatatattaatataatataattgggcatctaaaaagactagtgggatgaatatcacctttactgttgaagtcattagttgtaatgaaatgataattgtgatgttacacgaaccaaccaacttaaaaggtgaaattagattttctttttcttttcaacaataacacgtgagattatgttatcactatcagacatcaagccataaattatttatatattaaaggattgatggattccagcacaactcttggagagtctcaagattttttttttttccttattttaatcctgagttagaggatctaaatttgaaagggtaagtcatttctccattttttctttcttttcttaatcttttgtttgttagaatacaagtttgaggtgaagtctcacattaggaatgaatgagaaggttgaacaccatatgattgagaatcaagaaacttgttggtagaaagccccaaaaaagggtgtcctcttaagcacgccacgcacattaactagataatagaattgccacttttaacattgattaattaatgagtaaattatattttcatttttttcatattgcacccggtactcctctctttctatacattacttttaacattttttattaatgtcgttaactaacatcaattaaaatatttaagcagacgaaattgtccgttaaagtaaattacacttgcatctcctatgttttttttcaaattgcacttgatacccttcttttttatacattacttttacctcttttgttagtgtgtagggaaccagaggcagcagtgatggtgaccgaagttacgacgaaggacaaggaggtggtggaggtgactatggtagtggcgacgatggctacagtgaaggttgtggctacggttacagtggtcgttctggaaagagtgggtgcgctcggacgccatgtaagtgggcgaggacgacaatgagaacaagagatgatattgtcatgggagagggaggaggaagagaaggaggtggtagtggtaagtgaagaagagttgttaaacaagaggaagatttgtaaaatccaaaatgtgattttgaagaagaaggcgatggtgttttagacataaatttttattaaaagtcatgtgactagtatgtgtctaatttctgttaaattatcaaaaggtgtttaggagagagagtctatgtgtaatgtgagctaaacaattaagagattttttgtagggtataaaaaaggaagaatatcgaatgcaattaaaaaaaaaaggagataagagtgtaatttactcttaattaatcaccaaataattcttgcaagtttgcaatgtttataaaattcattgaatgggacattttacatacaaataaaatataaataggatagaaaaatactgattcaataatagaagagtttttcttagtgagaaaaaaaaacatttgtttaaaacttttagtttagaaaagtcttaaaagtaaattgcagaagattgttttcgaggtaacttgtaaatatctaatggcaattaatttgatttaaagattgattaaaaagttaaagaaattcatatattgttttttgagtaattaattaaggatgattaaattttgatttgataagaaagctctaagtcatataccagaaaataaaaataaaaaatggaactcaaaattaaactgttgtttcccattgaagaatgtcctctgaaatttataatatacaaatggattaaacatttttccttctttttttacacattttaaaactgattatatgcttgcaaactgattaaatgaatgggttgctcttcaacacatgctggtaacttgagatgtatacagttctaactcaaaagtatcacacattgtataacagttacctcctaaccatattggtaaacttctgagggcctagaagtgaaaaaccataggcagtaggtagtgacaagagtttctttacttttcctacatatgccctttttgtgaagttattataatcattggcttcaatggaatctaatatttgcctatacaacaacaatgatgcccacacaggccacctgctagctgagttgagctctgcaacccctctctctgcctcatcaaaaaacatcctcgccctctttatttgtcccttcatgaatttccgccatttgtctgtaactcttccgcggaaaatgtcatcatctgaaaggccagcttgtgccaattcatcttgtgggagatatactcttcctcttctagcactataatgatcaagaactagaccaagttagacaaaacataatttgaatgatgtggacaattaaaattaagagtttaactttcatgtatgtaaattaaagatttttatattagaaaagtaattcttataaaataaacaatctttttatatatgataatcgatataattaaattctaaaattgaatgttgaggggcattggcttaattgattgtatgaaacaagtgttatttttattcatttcttggaattgtgatgtgagatacccttaagtgacaagatgttcaatgccatttgtttattgtttttggtttaattgcaatgcattgaagtgttcaaagaaccttactcttctccaacatctctaagtatgttggtaagttgatttgcaatgcctagagccaatgcagcattataaatgctctctgttgaagcatttgattctggtgctatccccattactgggacactcataaggcctactgtcccagcaacatagtaacagtaaaggtagagctcatcaaagttattgtatctagactttctcaggtccatcctcatcccttcgatcatgtccttgaacggctgtttcaaaaagacaatgcaatgtcatttggatcagttttagcacataaaaaagaaggtgaaatctagttttataattttgtttttcgatagaattagtcctctattctgtataagataaccaatttacttctagtctctaatttgaacatgttatatctaaaggataaaacttacatagttgcataggtgcttttggcattattctttatcccaacttggagtttcactttgataatatgcataataaaggtttacataaatgtcaagtcaacatagattatcaaaggtgaaactcccattttgatagagaacaacatcaaaatcaactaaagaactttttatgtaaggtttgtcctaaaatgatgtaatgcttagatttgggcatgtaaagtacctgaatatcaacagggtactttgagacagtatgtgagagggcagcatcatacatatcatagggtcggccttcaaaaacatcactcaatcgttgctcccacctgtccaaggccccaggggtgatgtgtgaagcatttgggccatccactagctcatcagttcttctgcaccacactgcaatgcgcaatgaaaattgtcaattccaaaacaactctcactggagaagctgaagtagcagtgtgtaatataatctaatcacacataccataaattgcccaaattgcttttcggcgctctgcagtcatcaattgtgtgcctagagtatacagttttcaagatgagtcaattcaacaacaaaatatattattaacaaataaatttttaaaatccattaaaaatagtaaaaatattttaatctagctgctaagtacttttctgtacacagcaaaacaaaaggcatatatcatatgaattgaactttgtaattagacttaaggtttaggaacaaaagaaacatttcaattatattaacgttgtggtggaagaggagaaattactagatggtctgagaccatcattgtctcttgtctcccacaatcttcacatgacacataattgaattttatgaaatatttgtcataaattaaaaaacttcattatgtgacatcgtgcaaagattaactgagatcatgaacacataataactttgaaccatttaataattttctggacattatttagatatgatggggaacaaaataagaggactaaaattcatttgaatcagaaaaaatgaatgagaaaaggctcaaaacaaaagagcagcaagtacctaagtaaaatgtcttggcatactcagcacaaacttcaccacaccgatcataagccgcattcaacagatccacattgttgaaatcagcctcaacgtctttgtccaaatccagagctatgtttgtaccccttttgtgttcttttaccaaagctgcttgcttcagcaccacttcatagaccctctcctctgaggatcttgaagtctcagtagctgccactgcacttgaaaaagcagaagcaccactagcaaaactgattccagaaaacctcttttgtgttctttcaccaccactactactcctgcatgaaaaactcaccaaggagttgatgttctctttgggtccacaactcacccaaagaagaacaccagacatctcaagaacaaggcacaattttcactgctgttggtgcagctccacaagtgaaagtgcacaccaatgaaaagagagggaaagaaattggatgaaaaccttttgagaatgagtgtatacttgtggtagcaaaactatgatgaggtttgtttttgtttgtgaggctgtcacaaattttagaacctgcccaaagatatagaggaaattgtgaatgtaatcctatagccttaacacatgtcaaaatgtatggacagtggccttgtaatccttaacgtgatcaacttgtttgtctttagtgcacgatcctcttcactctcagcctctctattttgagcacaattttgttttgttttctttattttattgtagccccagaaaaaaggggcaaccttacattacattttacgtgtgtatgtggtcctatcttttgttttgcttgtgtagttgtagaatggatggcttaaatgcctttgatagtgtttttgtaagcattacttgtatagtttaggtttgtccagattcagagtcataaaacaaagggatcaacatcaattgattaaatagatatgagttattataaattctcatatttatctttcttttttaccgataaaaaaatatatatttagaattgtaatttttttgttgagtctgcatctcacatctaaataatgtcttagtaggcagacttaattttatttgatatatattatttttcacgaaaggaaaaaaaaattgtattttacaataatacattaagtaattttactcgttgttttttaattaattggcacactcacttaagtatgagttagaaagtacaaaagggaatcaatgcatccaacactaagaagatttgatccacaaactagataccatgttagatctatatatatattattatgagggtaaagagacagcaacatatgcatgtaattaatgttatggttcattatcaattcctccgagaatggaaacctagctctttgttttttgacctacgattttttattttatattcaattaatttttttctactaaattgattaattttggaatgaagtgaaacctgacatgatagaagcaatgctacttgtagattatttaatcaatcttttacgtttatagtccaccccgttaactattttgactaaaggcactatccaagtcaaatgattaagaatatatcttattttacccaatccatgatataataacaggcttaacacttcatcacatgcatcacataacaattaagttaaactctgaaaccataatacgacagccgaagtaagacatacaattgaggattattgatttgaacttttataaaagttaattttaacttaaacataatctgaatatttgccacattaattgctgaaaataatgataaactaaaataaccaaaagctgtaaattcttttttgtcatgaaacacgagatgccataggaatattcgactttcgagcctcaagcttcttccttggggcctcagccacaacctcatgtaaaacaaattgaagcacaccaccacgtgcactttgtgtcaacttgatggagctgatctccaaataacttatgaacgttttccattctctatcgtggcagaaattgaaccaaagcttaaactgcctaacaggctttcaaatgtagaatatttaaaatattaattagagcataaagacgaatatgcttgatgttgttctttcctaccacaattaattaaccttgatgccaattcagatgcatcaaatattctacgacgaatacgacaagtttggaagttcacacggttggtttcttctttaaataacatcaactcttcaagtaaaaccaaacataaatgctgactatatatattatattgcaccttaattaaacattacattaaacatttcaatacaacccgcggaaactcgcaataaaaattaattttgcataaaacatttctttttctctatcacatgaataattaattattctgtaattacatctattaaaaaagttccacttcactttttgtgtgtcaaatatcacccaattagtcattttataatacatcttgaaatgttccttgttaaatataaataattaattcacgtaaggattgtagtcaaagtcaaatatgccaagacttgaaatgccctttatataacaatcaaagcaatgcaactgcatgctataataataaataatcaacagaatataagtttcagcatatataactcaaccatgctgccagttatagctaattgcagtagtagataagaaatcaaatcgcaagtgggcactttcaagtttttaacttattgtcctcaggagcgtctagattcttggagatggtttcatacgtttccttcaatttttttgagtgttaaataactctttctaagcatttatgagggatggaatttagcgtagtttaaaattttgaacgttggcgtcacattgacaacaaattaagttgttcctcttcctccatgtcaaagcttcaaagggatatggtttcatgaacttttagaatcccgaaaggactttgtctttttctctccatttttatggtgaatgtatgtggacaactagctagctgggtgatcaaggaaaggccacgataaccaatcagaaccaagttaatagtgagctgttaatattgtcaagcaataaacaataaggaacttggccagaattttctttttaaatgtttcatagagaacccaatgctagctattttacatccgaataaagaaagaaagaaatagctagaacagaaagatgtgatagtagtagtatgtaacaaaaagaaaacatgaaaaatgagaaatctcatgaagtacttgcatcgtttcgaggtgttcaaacaatagtaccctataggctgagaaaaccctaagtagacaccatgaatttcggcaaaggatcggacaagggcgaacgtattttgcttttttaaatcacaaaatggttataaaatttatatatgtaaacaaatacattattagataaaaattaattgttataaaatttattatataaacttatatgtgtattaaatatacattagaaattttaatattatatataacgacattaattatttttaacataaatagctcagttggtttaaattgtccaatccgtataaaccttataaattacgaattcataatgctcttaaggattagaagcttttatcaaagggtaatatcggaattgtaatgtttagtgtggggtatattgaaaattcgtatgatgtaggaagcaatatgcctagtcctcttgggtcgtgaaatgtgggctgagttgctaatagcgattgtcatccgaataacccactcaacgaccccttattctacccgcagagagatgattgtaattggtagctttcaagtttcagagcttcggatcgagtatacacttttgggtaacgaaatgaaacgatgttgcgtaactgcagttgcacatgcatctattatagttaatttagcttaaaagttttgtctacggtaattttatctgtctaaagtaattttatatattcatttattaattctcaactattttttaagtaaaattaactatatttacccatataattatgggatttactaatttacacacatatttttttaatatgaatatattgacaaactatatcattattgtattttaatatgtatatatactgcaatggcaagaattacaagtaaaaataaatactagcgtcacaccaacaccacttgatactatttgtatggataaaattcacactagaaattattttcccttgttacaaatcaacaagttgcatgattgatgaagaataagcaaaggcaatgacgattaattaaggaggtaatcccaagagaaaggcctaagaatttgaggagccctaacctccatgaaattcaaatgagccttgagaaggtgcatgtaaaccaaccaatcaccattcccattagcacaaggcattggcatgacatagccagaatctccaccccaaggaaaatggtacgatgcaaacacgggcttcccccacccaaagtcaacctttgactccggaaacctttgccctgaagagacaacaaaacttggtcctttttcttttccatgcccacaataaatccttgacaaaccaggcacaggtcggtgttcttcaacccaatcaacaagccctaaaaaatggtcttctgtcacacccatcttcaaaaactcatgaactttctccgccacccaactcaatggcttttccacaaactcatcaaccgcattcccaccataaggaatcgaaagaacattgccaaaatacgaactcatgttcttttcatcgttgcataacatcttccttccatcaaccacaatacccatcttggcaacaacgtttttcttaccatcaacactagcagttgcttcagcaaccatcttccacaagaatgcagagaaagactcgacctttgtgcgcttcacggtaccgtttgagctagctagtgcttgcatgcggttcaggtattcgcttgtgacgtagtatatgcggctgatgagtggctcagatttgaaaacgagtttcttattaggatctgacggtggaggtagcgccgagacgggaacgtacatgtggtggagtgaagggtggatggaaggtgggcgtcgtggggtaagaagggagcgtcggaaacatggctgggctgatattatgggcttgttgggccgggttgtttcggcccatgatacgaggaacatgttcgcagagtaggcatcagctgtgcgatggtcgaaagtacatgcaactactaaacccccacacttaagctgagttgcctgcaaaactcacatgtcttataagacaaataattaataatatgttttccgcgcgattaagaatcaagattttttttatttatttagagcatgtttagtgtatgagcaagcagcttcaaatttggtatttcttagatattataataaaagaagtaaacaaatcttagtcatggagatgcacattatttaaaatttttttttttcttgagatttcaaaatgaaatttattattaaaataataaaagatattttgagaaatcttacattttacttgacaatatgaaatccacaaaaaatgatataaaatctcaatttgagatctactactaagagcatttttaatgcaaaatctctcaataaagaagttgaagagatcttcaacatggagaatgagttcttgtagaaaatccctcaatatctatacaatgtttaaaaaagaataaattttttccctctttctctctccctaagatctcaaaatgagatctactattaaaaaaaaattagagagatcttaaaagatcatcaattctatgtggtactataagttcaccaaaaaatgatttaagatctctatttaagatctaccactaaagatgctctagatgttataatacttcatttctttaatcctatatataaaattcaattatctaattcattaaattaaaaaataataatttaattaatattaataattttattttaaatttttaatattttataaaattatcattatcatttatatttcatttttttaattatttttaatatattctttttcttcttttaatgatgaacaaacagttttaaatttaggtcttataaagtataaaaataagtttgactaaccagtactcttataatacttactaaaaaattcaaagaaaaaagattttaatgtaaaattataagaaaatatagaaaaaattaattatgactaacataatttttcacatctcaataaaaaactttattcttttagttttctaacctatgttctaatatactagttaacatatgctggtaaacattttcaaaatataggtttgtttatgaagttgttttatagtgtatcacctgaacagcaagcacgccatgtttcttccttggtacaagcttcccttcaacagtgtcatcaggattgtacaagttgaggcactgtagttcaacatcagctacagcttcaaaaaaatctaccccacggttactgcaaaacagctcaggctcacccatggtgttggccaccatttcaccagcaaaagggtaatagtatactagagcccgagccagtgcatttttcagtgacctcaccatggtttcaaagcaataatatttttcaggcaaaggttttttgtagcagaagaatacactcacgtctactgggggaatgagtagatcaaggtttgatagtggcagccattgctctttcattgaaagctctggtaccactacctcctccttggtcacactcacaatgaattctccttctccaaccttaccatccatttttcagaaatattaaagctgtgtagctagctaggcttgttaattcaccatggcagtactacttgattggctttttaatgcacaggctgtaagggtcgcatgaatttattggcagtggcctagagagacatgcgaattgaatgtgcaatgtttgatattaatgtcaattttaagcctgatctcatataacacaatttgtatcattaattcaaatcacgtttaattgactgaaaaatactatttccaattgtagtatcttgtacttcccgaacaatatcaaaacgtttgttgtgtgtaaatattactgtatttctgataagaataacattaaatgtcaagtggcaaattaattatggtagttgttggtgaccacccgcatgcttcttacttagttttcaattgagtatgtggttctatatatatccacttaaggtctttcatgatggcagaattggggacctgtgtgatgctatatatcacattaattaattttcactccatagtattggctattaattaagtgtggcatatattacttcttttatttctggcaggaaaaagtcactggactaataaaaaaagcaatataaaaccgtctaaatctaaagaacattgattggtagtagtatattaccaaaatataaaaatcataaattaaagactaacacctatttgaaattttttaaccgcgacaagttgtcaaaatcccctcaagtttcaaaaagaaacactgaggaagaagtccaatggtaagctactgagcaaggcttttagtaccaaaagctgctattaataaattgttgtgttttgtagaacacttcataaggctcatggttttttaggttacaacataacgatatggtttagctttcctttaagtgtatatataaatacaaacaatatgttttaagaggtttcaaacaagtataaccaaagtgtgtgcttgtctgcatgaaattgctttaagtgggctagatggagtccaaattattcgatttatctctcttgcgcgcccattgaaacgtgcctcatacaaaaaatggttttctctttaattaattatttccagagattattaaaatgttcacaattttatcttttaacgttcaaattttctcccaatctccactaaaagttaatgctttcattctcagtttttatataccttttatctgatttttttcttcttatcttatcaccaatttttgaaagctttttgttcctctctttccttctgtgagaagtctggattgttatatatatatataaattacttatgcgcttgtcagttctgcgaatattttaacttttatcatttttttttattattagattctaaacttttttcttctctcaattggttggccgaatgaccaaaaggataattcttatcaattgaaaacaaattttgaattaatactcaaataaaaataagtcataaaaatatttataacttttaattataaaatcataaaaaattgacaatttttttttaaatcataaaaactgaacaactttaatttttttttctctttttatatgaagtcgtaaatttttttattacttcaaagtcataaaatcttttacgactttcaatttatttttaaattttaaattattgatattaacaaataatattaacttaaaatttatcaaataatattaaattttttaaatatttttaattagtttttacatttatcattaagtaaactaataactttgtataattagttaattaattttatttgataaaatcattttaatattaataacagaaaataatnnnnnnnnnnnnnnnnnnnnnnnnnnnnnnnnnnnnnnnnnnnnnnnnnnnnnnnnnnnnnnnnnnnnnnnnnnnnnnnnnnnnnnnnnnnnnnnnnnnnnnnnnnnnnnnnnnnnnnnnnnnnnnnnnnnnnnnnnnnnnnnnnnnnnnnnnnnnnnnnnnnnnnnnnnnnnnnnnnnnnnnnnnnnnnnnnnnnnnnnnnnnnnnnnnnnnnnnnnnnnnnnnnnnnnnnnnnnnnnnnnnnnnnnnnnnnnnnnnnnnnnnnnnnnnnnnnnnnnnnnnnnnnnnnnnnnnnnnnnnnnnnnnnnnnnnnnnnnnnnnnnnnnnnnnnnnnnnnnnnnnnnnnnnnnnnnnnnnnnnnnnnnnnnnnnnnnnnnnnnnnnnnnnnnnnnnnnnnnnnnnnnnnnnnnnnnnnnnnnnnnnnnnnnnnnnnnnnnnnnnnnnnnnnnnnnnnnnnnnnnnnnnnnnnnnnnnnnnnnnnnnnnnnnnnnnnnnnnnnnnnnnnnnnnnnnnnnnnnnnnnnnnnnnnnnnnnnnnnnnnnnnnnnnnnnnnnnnnnnnnnnnnnnnnnnnnnnnnnnnnnnnnnnnnnnnnnnnnnnnnnnnnnnnnnnnnnnnnnnnnnnnnnnnnnnnnnnnnnnnnnnnnnnnnnnnnnnnnnnnnnnnnnnnnnnnnnnnnnnnnnnnnnnnnnnnnnnnnnnnnnnnnnnnnnnnnnnnnnnnnnnnnnnnnnnnnnnnnnnnnnnnnnnnnnnnnnnnnnnnnnnnnnnnnnnnnnnnnnnnnnnnnnnnnnnnnnnnnnnnnnnnnnnnnnnnnnnnnnnnnnnnnnnnnnnnnnnnnnnnnnnnnnnnnnnnnnnnnnnnnnnnnnnnnnnnnnnnnnnnnnnnnnnnnnnnnnnnnnnnnnnnnnnnnnnnnnnnnnnnnnnnnnnnnnnnnnnnnnnnnnnnnnnnnnnnnaataataaattaaaactaatttagagttaattcaaaattaattgatgttttaaaaaaatggcacgagttagaaaacgttttacgacttcaattaagtaactaaaaaatgtaacgattttgaagttataaaacattttatgactttatataataaataaataaataactgaaatcatttaatttttacgatttaaaaaaaattgataattttttacgactttataaccagaagttgtaaaaatcctattgcttaccccaatttgatattaattcaaaacttatcccatttgataaattcaaaaacgaattacccattttagtctttcgacctcaattgctctcagaacttatatttatttttaattaggttcaacaagaaccgacagatatctcgttaaatagcaagaaccaattataattaataataattcagtgacttatttaaaaatgacaaatagtttaaagatttaattaaaaaattaccaacctctctgtaggttaatattctcactagtgtaagtcagtatttttttctcttctggttctaaactcaatagttataagtacttcaatcagtttataacctggatgagtgaaaatactatcatgcagaacctaatttttttaaaaaaataatgctttcaaacaagtaatgtgttgtgctcctgcaggcatgaaatcggttttattgaaaatattgttaagaaggtatatgaaaatatagatattttaaacctttacatactggtctgaacactgttggactcaggcctcgcatagaagatgtgaaatcacttctagacaagaagtctgatgatacaactgtacgcatgttgggcatttatggacttggtggagtcggaaaaacagaacttgccaaagctttgtacaacgatattgtgcaacagtttgatgctgcaagttttcttgccgatgttagagagaaatcaaaattttactcttggctttggattccagtctttcttgattcaccttgcatcatgaatgtttggaggagctgttttttttttctttccaaaagcactaaagcagaaagcttaatccgagaacaaaaaaaagaaaaaaatcttactcaaaaccgctaaggttttgattgatgtagtgtactagaaaatttaaataacaatagcatcataatattaaaaacaaattaaattggtaacattcttaccttaaccggtccaagttttcaaaggttgagcaggaacaaaggatcatctaagtctggaggaaaacctctctctatagcctaaaccaatcttccagaagataagctatagcctctcttagtaattaacacagcatttagtgttgccctcatctttgcttgatagagtccattgagaattccttctttatttcctgatacaatgctagaaatgttttttaaagtttctctactgaaaaaagttttatatttttagtaaaaaaactctcgatagcaatattgtcaaagtcgagagtctacgtaaacttgtgggagctccgtagactcgactcatagactagaatcatagaatcgtaagagtctatttcaaaaaaaaaattacttatataaaaatataaaacataaattgatacaatcatacaatgccatcagtgcttgcaattagcagttagcatcatgctatggaaaaaagaatcaatattttttcaaaattgacatcatgctattgcaattcaatgtatacaatgccatcagtgcttacaattccaaatattatttggaaaaacagtcgggaaaacattcagttagcagttagcatcctgctaaccttttagaggaagatttaaggacaccatttctttaatcttttgcagataatcttgttcaaaacattcataagcatttaactcatggtacaattcctacataaaaggagaaaatcagtcattaaaaaaggaatcgctaaaaaatttcaattggaaaacctgattttaaccaaaaagaacttagtaagctatcacaagtaggaaacatcatcaacatcaatatcaacagcacttttaactcaagttaattggggtcaatggtagatgaacccaataataaataaaaaatgagacaaagaaagagaaagggggaggggaaaaaaaagtggaaataagacaaaagagagaaaaataagctaacataaaagagaggtgaaaggaagaaaggagaaaagaagaggaaaaagactaaaacaatggaacgactggaacatataactactattaggtttaacccttcaccaaacttataacttttctccactctgtcctaagacatatcgtccaccaatctatatctcactccattaagtattatttaactacatttccccaggtaagtttcggtcgacctctatctctctttgtatcgagctcttgataacaaactattgttcttacggggcatccagtgatcgtctcataacgtgtccaaaccaccttaatctatgctccttcatcttttcacatatcggtaccactgatacctttcatcaaatatccttatttcttatcttatccatcttcgtatatctacacatccaccttaacatcctcatttttgtaacctttattttatgttcatgttgtctttgtgctgaccagcattccgctccatatagcattttcaatcttatagttgttctataaattttccttttagcttaaggagaattttgtggtcacacaaaaacccagatgcactccaccaatatgaaccaatataaatacacttgtcggtatgcctaaaaactgcatataggtaataccgaagatccatgaatcaaaatcatgcagcatatattcaagaaaccaaaatgatgacaacaactttacttagtcaccagtatgtcctcgtttccctgctgctgaggatcagaggttgaagcttctcctacaacacccacagccacagctgccttcacttcatcctttggtatcgaccgtcgaatgatctcatggaggctttccattcctctccacataacatgttatattctgtgcttcaacaagtccatccatcattgcatcatagtatatttccctcgttaattgttgcagctgaggattgtagccttgtttctcatcacttccctgatggccagaggatgaagcttcttctaccacgtcgtcccggggttcttccttcactcctttcagtgcgagatccttatcaggctcaacttaaaacggcatttgatgttgcccatttgtctaaatcacgaaagctcagctttgcctcaaggagtccgttgataattccaatcgtgtacatcctcattgcaactgtgggtagtaccacattccaattgggtgacaatttaacccatttactcctgttttaagctgcacttctggttttaacaatatccagagaaggaaagctatgtccatctgtcaatccatcatatattattcccctcaatatttcttgatgctgagagtgaggatcatagccttgttcctcatcacttccctgatggcctgaggttgaagcttctacaactttcattgtactgattgcatctaggaaaggcgttgtgtcgagtacatgtaggaaagatgtcaggagggactgcgttcggattccaattcgtccttagcctgcgtagatatctcctttataaatccaattagggaatacaattcctctaaacctttaccctgcaaatcctttcttttttcatactagtccactgattcaatgaacatccgcttaatcatttcgtgtagagataattccactattatctgtttccattcctgcttaggatctttcataggaactaatgccggtgacaacaacacgtttgaatacttggggtcgggacacgtgatttggacatctttcatgttcttcgctccttcgaattcttcagacacaaagactccccaacaacttagcgtcaaggtggacgtggcttcatatgaaacttgcactacaatccactcgtgctcgagaaacactgcctcaaggctaagccactcctcgtcactgaacaaaactcgtagatcacaaattaagacgtgatctgctgcaactctgaagttgtaatagcctttgtggtgaggaacacatcgagtgccattgataacaaggtgcaactcaacaagttcaggaagagaatactgtctcgctctcgcccttccacttacatcctggaagaccacgaatccagaaacgaagatcctctcctccattgccaatgaagtcaaaccattctgagatctcggtttggggcatcaccacttctaatccacatattattcctttcacggcctagcatacattatgtaagttaattcagaaaagaaaattaaaatagcccagatgatgtttacttgtttatgcatttctcatgttttacggatgtgtatggggtaattaactatttatctgtgtttaaatcagcttaccttgcatttgggtataaaactaagaaaaagtcaacaatacatgcattttgtgtgtacatgtgcgagtgcatgttggcgggtgtgtgtgggtggtaaaactaagaaaaagtcaacaaggagtaccttatgaagcatgatataaaagtaaaatatatttatatatcattttatgatagttcattgtcacttttatttaattaaattttatagaatttctgattattgttagtatgactaacaagaaaaaagggtgttttaaacaaaaaattatttgaagagcaggagtaataaacatgtaaaattacactattctagtctcatttatgttttcctcaactaaatgaaggaaatatgcatctgaacacattctctttccaagcactttcttttttctcgtaaaattgcgaaagtataaaaaagaaatgtgcatatatcattttcctaagataaaggtatagtatttagatatgaagcaatgaatggtgatatatacatgaaaccatagcttctctgatgtctctctagttaagttgaagcaatatcttgcatctactttttgaatagtagatggcaaccatgaaatttcctcaagattcccacattgatgaacattgagaattctcaagtcagtgcactcaggaatattttgaagctcccagcagccactcgatcatatcgagacttgtcaagtgattacattccttaatgcatgcagggatagatacaaaattgttctccgatgcagttaagtcttctaattttttaaagcaattgagaattgcgagaagatcttcatctgacaaaccaccctttccaaaatacagtgtccttaatgttggacgaacattggctgctgatgggccatgtacgaacttttgaaggattctcgaagttgaggacatcctccaattttaaaggcatcaacatttggcaacatgaataagctacttggtagatacttaagtttcctgttatttgatatgtctatacaagcaagcccagtaagattaccaatggattcttgcagtttttgaataacagtatttatcaaaaaaatattcaatggcttgttcatttgttgcattatctctgggaagtgttcaagcttacacttaaggtcaaggacttccagagaaggtagaaattaatattctttgcaggaaatttctgagtttggtgcattctgaaacgcttaaatgagaaagtcgttttagaaatccaacggttttatgaacagcaattaggtttctacaattatctagtctcagttcccttagattttgaactttagaaacatcatgcatttcggtgatagattggttatgtgaaaaattcatcttagtcagccatgaaaatctctgccagaaagaaaaggttagtacaatgattagcaacatgtttgggttatactattattttttaatgtgagtaacaatggaagcttttgttaaatgaaaaaataaaatgaagtagaaagaacaagaaaacattctacagaattgtaccttaaatggctcttccaacgttagatggcttctaggcaaattaaagacaatgatttccttcgggatgaaaaattttgatgggaaagactttgaaggatactcttcccgcagatgtttaggctcagatgaaaaagatgtgtttcgaacaatgagaattctgagccatttcattttctcaaaagcaaaaccactccaatctacttctgctcgctggggaggatcaagcattatcccctcaatcttgtcacttcctttaaaaacaattacaaacaagtaacgtcaaatgcatgttgtcattattacaatagactataatgtataatttataaaacaaaagatacatgattcttaccaaatcgatcatcagttagtatttcaataacatcaacataatgccatagtccgctacgttggccaggattttttggtgcctccttcctaacaatctctctacccatatcttgtattagatcatgcatcttcaagcagccatactcaatggtgagaagagatttattaacataataccatagtctgctaagtcatttatggatttgtccttttggaccggttttaactgttatttgaccggtttaaggtgtccttgacagactcagttaatatttaccccggaacgtgtcatatgttttttgtctcgtagatgatcgttggctttacgagcgattaagggtaattaatatttaccccagaacaggtagtgaagagaaaagaaaggaaagaaattgtgggttctaatttttcactaaaaaaacatatgaagtaaaaaaaaaaaaaaaaacatataacttttattcagtagcaaaagaaaaatagagggtaaacaacaggaaagttaagagcatgaccacaaggaatatccaaattaaacaccagcaaacaactgaaaatgaaagaaagcacaaattcaacacattctattaagtttaacactacccactttcttccttaatccctcactttcattggaatctgctaaaagtacatttattctggactaacatattcaaagatgatacactaatagctgtttccctgaaactcattcagcaactagattggaactttgtagagctggagaaccttgttccatgatggtctactgctaatgtcatcccaccaggcacccacatgcttcctctcctttaataaatactttttgtccatattgttcacaacataatcaagaaatggaaggtggctaatatcagcaatgctgaagaaatccccagccaaatacttagtctttgagagcctctcctcatagatgttcaacacttgcaccagctttgcttcactttcctcaatcaccttgggatctggagtcacaccaaatattgaaccaaacaaaccatgaagtcacaagttgtgggcttgtgggtgaaagttgtgtgcttcaacttctagccattgctccacaagacccctctcttctattgtttttcccagcaactcaaccccttgagatctgtatttttctgcataatacctcattatagcacgagattctgcagaaaaacatgaaaacactcaaattagagggtaccagtaacaaaaactgaaggaacaatcatagatcaacaaaattggttaagctattaatcatttgatcttttttaattttagttcagaaaactgttgagttttagtccctacacatacatacaagttaagttttgattctattgctaacagcctaacacccatgattttaaacagtgttttgcaaccacaattgcgaccgcaatgtcaaacgtatagtttaaaatcgtaatttaaaatcatgctaacaccataaaagaatttctaacgctaaaacgtatagttttcttacaaagactctaaaacttaaagagatataaaaagcaagtgaatagtttaaccaacaaactatatataagtagaaaagcagaacaaaggagcacaaagtgtaaccatataaggtataatctccatctttgatgacaggaacaactccaaatggctgcagatattatgaataaagaacatgaatgagaagataaagaattgaagacaaatcatattcaacaaaaaaaaaaaggaaaatagaagagttgaacctgtagtttgaggtactcaggatccttctgctcccccttattgacatcaacagggacaacttcaaattcgacttccttctcaaccagacaaaccagcacccgctttgtggaagcacagtggggaccgtatactttcactaccatgttttgattctcttgaaaaatggttcaaatcaagagtgaaatggaagagccacttatatagttatattactcaggtttgatcagcacatatatattattgtttagttagtgacccaaaacaacttatagctctacatgtcaagtggtcagtgaaagcagcaagcaaattaacaaatatcaagttgatgggtgggatcaaatctggggacaccacgttaaacaagagattaatatttaatatttattgtataattttaatcaattaattaatgttatgcgtaaacaactttaactttaactttagttaatagattaataaaaggtaaatggtaatcaatattttaaaaatattggttaaaaaattaaaataaaaatatttttattaaaaaaattgttatttataattttttttacaatttaaataataaacattttttctttaactttaactaatatcttagaaatatttatcaataacatatttgtataaataaatgatatcagaaatgcagcataggagaatcacttttcattagttaatagttattaagtggagaaagaaactcactggttgcttctggagagactcttgggtccttatcttttttgggctattagattataagatcatacgtcgtgatcttatttcctcccttgggtcaataattcaggtgcacttattttttcaaaatatttggttgtttggtcataagtatatatgtgtgtgtgtgtgtgtgtttcatttgggaagttttcctacgtgttcgtctttgctaacttacatatgtggtcttaaataagaatggaagtaactcatggtttccaccggttcacgctaaggagttaagttgatccttttgaaaaacagtacattggaacacgaatttgaattatgtaaaccccgtatgtacaaaaaggaaaaattatgtaaagaacctaaccaatggttattatcaagcctagttgcatatcttatttttcaaggttctcaattatattattttaatttttttatgttctaattgccctaattaagtcctcaactatttttaattctgcaatcaagtctctatcattaatctgctaaatataatatttttgctatattgcctaaacatatatattgatttgacattaacatgatgacgtaatgcttatgttacatgcaaaagtgagaaacaaatttagtaatggagatgagattcgaactatcacgccatcaaattgtgacaaccatcaagcactacattagtatgtctgtaacatgtcaatatgtgtgtcaacatctatcaatgtgacatcatgctaacttagcatatccatgtcatgttagcaaagtctgttaaacatgtaacgttgatggaggaatttgattgtaaaattgaagataatttagagactcaattaatataattaaaacctgagatattaagctagcacaatcctaatatctaacaaatcaaaaatataattaaatcttattttaaaagtaatagctaacaaaattgctattatagagcttttcagtggtttattattattattattaattattattattattattatttgctatattttttaaaattattatcttaagtatttatattttgttattaaacaagataacatgtttaaaataaacagcctcttctttttttaggtgaagatgatgatgtccagccgccattgaagaccagcagcccctggagccatcattgatgaccagccagccaccattgatgacttccagctatgcaccacctaccatgcagccatccttgacaattgctttccccattcacaccataatgcattctataaatagaggtgcaaacctcagttgtaatcatcaacgaaaaacaccagaacaccaagagtgaattcctccaagtagtgagaattcctagtgagtgtggtgtgggtttgagagtttgttttgtttgagtttgtaaatctctgtaattctattcttgtgagtaatagaagttatttttctctcaaattcgtgtgtaccaacacccaattgatccattggcctcaacaagtggtatcagagccaggttagaggtgttggtcgattttttcgttgatccgggttttctgagttttgcccgaaatccagttttgattgcaccattggattcgtctcgtcgaatcgagtccaacgcaacaaacggcgagttaaacggagttcaaacgagcccagaaatcgcagtcaaagtttggtcaactccgccggaagttacagttcgtcgccggagaagatgaccggagttactgttcatcgtcggagaagacgaccggagttatctttctaaaattgcggtttgaccccttatcttcctaaaatttcagtttgaccccttatctttctgaaatttcagtttgaccccttatctttctgaaattttattttgacccctagtttttctgaaatttgtgatttggtccctaaagttttgggaaattgctattttgcctcaatagtggaatattgaccgtgaagtgtcaattccatcattgttgaccgttccagacgcaacggtgagctccattttgtaagattcaaccttgttttggtgaattaagctactataaggtgataatgaccacagaagagtcaacatcatcttccggagccatgattatgcttattgctacaaattatacgctgtggagacctcggatggaagatctcctaagctataaagatttgttcgatcccatagaattgatgggtaaaaatcctaattctgctaaggagttggagtggaagaaatcaaatcgaaaaactattggtcagatccgtcaatggattgacaatagtgtcttccaccatgttgcacaggagacagacgcatatgccctctggaagaagttggaggacatgtaccaggccaagaccgctcggaataaagccctgttgatgaggcatttagtcaacatgaagttaaaagtggaacttcagttgccgagcataccagtgagttccagagcttggtcaaccagttgtcgtctgtagagatgccacttagcgaagaagttcaggcgctgttactactcaattcccttcccgatagttgggaaacgctggtagtatcactcagcaactcagcaccggatggcaaacttaccatgtctatggtaaaggatgctctatttaatgaagaggcaaggagaaatgacatgggcacagatcaagacccatgtccttgtcacagaaaaccgggggaggcaacaaaagagtagtaaaagcaaatggagaggcagaagcaagagcaggggcagatccactgatggcagaaaaccaacatacaagtgccatcattgtggaattgaagggcttatgaagaagaactgctacaagtggagggaagagcagacccagagcagttcgcagccgaagaacaagggtggagaaacattagttactattgttggagatgtagctttttgttctacctatgatgagacatgccttcacgtctcacgagaagacacagaatgggtggtagatactgcagcatcctaccacgtgactccccacaaggaatacttcacatcataccaagatggtgactttggagctgtgaagatggaaaattccaattcctctgggattgtaggaattggtgatgttctagtaaagacaagttctgggagcacaattaccttgaaggatgtccgccatgtgccagatcttcggctgaatctattgtcaggaatagctcttgacaaaaagggctatgatagtcacttcagtaaaggcacatggaagttgtcaagagtcgctatgatagtcgcccgaggacatatttgtggcacgactcatgtgaagatatgcactgacgttgcagaaaaatgatggcaccagagactcggtcacatgagtgagaaagggttgtctaccctaataaagaaggagcttatcaatgtagacaaggatgctgcactagatccttgcaattattgtctgtttggtaagcagcatagagtctcgtttaattcctcttcaatgagaagatcagagttattcagtctggtacactctgatgtttgcggtcccttagaggttgaatcacttggtggcaatcgatatttttctaatatttatcgatgatgcttctcggaaagtgtgggtgtatttcttgcggacgaaagaccaggtattcgattacttcaaattgtttcatgtcatgatagaacgtgaaacaggaaagaaattgaagtgtcttcgatccgacaatggaggtgaatactcttccaagcagttcaatgtctattgcagatcatatggcattcgacatgagaagacggtccctcgcacccctcaacacaacggtatagctgaaagaatgaaccgaacaatcatggaacgtgttcggagcatgctcagtatggctaagctgccaaagccattctggggagaagcagtcaaagccacctgttacttgatcaaccgatctccatcagtaccattagattttgaagttccggagaaactttggtctggaaaggatccatcatactctcacttaagagtatttggatgtttggcgtacgcacatgtatccaaggagctcaggcagaagctagatgcaaggaccactccatgtattttcataggctatggagatgaagaatttggatacaggttatgggatcctaaggagaaaaaggtaatcagaagtagggacgtggtgttccatgaaagccaggctatagaagatattgaaaaacccacaatatctcagaagccaaatgttgcagctcaggtgccagcaacagaaccattgataagaaatggtgatgcagtgccagaagacattccagaagtagaaaacaatgaggaagaagatggtgttgagcagggggagccacaacccgctctaccaaatgttccaggaccatcacaagactcagatgatggtggatctcctcatattctagaagttcgtagatctgaacgagatcggattccatccagaaggtatccagaatccgagtatcttctacttactgaagatggagaaccagagagtttccatgaagtagtatctcataaggataaaagaaaaaaaatggctgctagattctcttgtgaagaatcaaacttatgagatcgtagaacttccaaaagggaagaaggcactgaaaaataaatgggtgttcaagctgaagaaagatggcagcggaaaagtggtgaaatacaaggcacgacttgtagtcaaaggattccaacagaaaaaggggattgactttgacgagatattttcacccgtagtcaagatgacttcaatcatagtcatacttggattggtcgcaagtatgaacttggagcttgaacggatggattgtgaagacagtttttttttttttttttttacagagacttaaaggaataagtctacatggagcagccggaaggaggtttcaggagaaaacctcatatgcaagctaaagaaaaagcttgtacggtctgaagcaggcacctaggcagtggtacaagaagcttaactcgtgcatggtaagtcaatggtacaagaaaactgcagcagatgagtgtgtctacattcagaagtttaatgtatgcattggtgtgtacgaggccctatattgcttacgcagtggaaacggtgagttgttttctctccaatcccggaaaagagcattggaaggcggaaaaatggattctcaggtaccttaggggtacaatggagatatgtctttgttacgggggagttgatacattgtgacagtcagagtgctctagatttgagcaagaactcaatgtatctttcccgtacaaaacatattgatattcgctatcattggatacgcgaagtaatggatcgacaactgttgagactagtaaagatccatacaaagaagaatcctgcagacatgatgacgaaggtggtgactcgagagaagctagagttatgcagagacataactggaagctagagttatgcagagacataactgaaatgtttttcttcagatacggctggagggggagtattgatgatgtccagccgccattgaagaccagcagcccctggagccatcattgatgaccagccagccaccattgatgacttccagctatgcaccacctaccatgcagccatccttgacaattgctttccccattcacaccataatgcattctataaatagaggtgcaaacctcagttgtaatcatcaacgaaaaacaccagaacaccaagagtgaattcctccaagtagtgagaattcctagtgagtgtggtgtgggtttgagagtttgttttgtttgagtttgtaaatctctgtaattctattcttgtgagtaatagaagttatttttctctcaaattcgtgtgtaccaacacccaattgatccattggcctcaacagaagactcataatatgttaacctcttgtacatagttcaactctaatggaaagccattgttataactacagtataagacgagactccaactaaaaaaactaatactacatttattaattaattgggagagtctcatgacttatgtatataatactacattaaactttttttttactcggcagagaatcaaagtgatcaatgtctcacgtgtgtgagccatttggaaaaacattcgtcatatatattcttatatattgagtaagaaaaatagagggtaaacagatcgaatgctaagaacatgaccatgaggaatatccaaattccacacaagtacacaactgaaaataaaaaggagatcaaggaagtacaaatcaacacattccattccatgaggttgaacattacccactttcttccattcctaactttctttggaatttggtaaaagttcatttattcttctctatcatatatattcaatgatgatactgttgccattccatataacaacagatactaataattcagtttccatgaagtccattgaaaattagattggagccttgtagagctggagaaccttctttcatgatggtctattgctaatgtcatcccaccatgcactcacatgcttctctcctttatcaaataccctttctcccttttgttcacaacatactcaacaaaaggaaggtggctaatgtcagcaacgctgaagaaatctccagccaaatacttagtatttgacagcctctgatcatcataaatgttcaacacctgacccagctttgcttcactctcctcaatcaccttgggatctgaagtcactccaagcattgtagcaaacaatacatgaagagccaagttgtaggctggtgggtgaaagttgtgtgcttcaacttctaaccactgttccacaacctctcttctactgtcctccccatcaactctaccccttgagacctgtatttttctgcataaaactcattatagcacgagattctgcagaaacacatgaaagcactcaaattagcaggtaccatgtaagagtagaaccaaaattagttgaaccggagaaacaatattaatcatgaagcaaaaaaatatgagttcaaagtgtaaccatataaggtgtaatctccgtctttaatgacaggaacgcatccaaagggctgcagatattacgaataaagaacattataatcagaaaatacagaattaatcaaataataatcttgaagactctaatcatattcaacaagaacggaaggaaaatagatagatggaagagctgaacctgtaatttgaggaactcaggattcttcagtttccccttaaagatatcaacagggataacctcaaattcgttttccttctcttccagacaaactagcacccgtttgtggaagcacagctgggtccgtacaccttcactaccatggttaatttgtttctcttgaaaaatccttcaacaagagtgaattggaagagccacttattgttgcttagttacacttcttatagtgcctctaaatgtgaaatagtcaaacaaagtctacatcaacacaaacaaaacagaggttgatgggtgagatccggggacaccacgtgagaaagagggggatcaatgtttaattgatagggcatgcatgcattcaaaataagttttcctgcgtgttagtctttctaactcacacgtggtcttaaataaaagtggtagtaatcgactattactgactaaattggcaggaaattgatcaaaatgcattcgaaacactttttcattttgtttacaaacgcgctactacttaaacccttgaaaaggtagaacgtgcccgatgacaaaatagggaatgaagagaaattcagtttgataataacaatgtcttcatttcagcttttaattcttgttcttggatcttattttaggacattaattgaattgaaggtatcctctccaactcaagcactatatcttttagttatataaatttacatgtcaagtgataattcatattatttgagtcactattgtttagtatgctgaattaactcattcactggaaacatattatatatatatatatatatatatataaatatatatatatnnnnnnnnnnnnnnnnnnnnnnnnnnnnnnnnnnnnnnnnnnnnnnnnnnnnnnnnnnnnnnnnnnnnnnnnnnnnnnnnnnnnnnnnnnnnnnnnnnnnnnnnnnnnnnnnnnnnnnnnnnnnnnnnnnnnnnnnnnnnnnnnnnnnnnnnnnnnnnnnnnnnnnnnnnnnnnnnnnnnnnnnnnnnnnnnnnnnnnnnnnnnnnnnnnnnnnnnnnnnnnnnnnnnnnnnnnnnnnnnnnnnnnnnnnnnnnnnnnnnnnnnnnnnnnnnnnnnnnnnnnnnnnnnnnnnnnnnnnnnnnnnnnnnnnnnnnnnnnnnnnnnnnnnnnnnnnnnnnnnnnnnnnnnnnnnnnnnnnnnnnnnnnnnnnnnnnnnnnnnnnnnnnnnnnnnnnnnnnnnnnnnnnnnnnnnnnnnnnnnnnnnnnnnnnnnnnnnnnnnnnnnnnnnnnnnnnnnnnnnnnnnnnnnnnnnnnntacaatataatataaagaacttcaaccaagcctttgaataaaaaaaatcagatgggtctcttgaatcaattcatataaagtaaaaaatgattgtatttttacaaaatttaaaaaaaaaatgcaactcaaactgaaattaggtataaagatctcttgcagcaccactatttctgaaagaaatcttgtaattgtaaatgcactaggaaagaataatgatcttctctttattaaaatgggaaacattatagaatgaaccctcaaaagactggccaattgttattttaagtctttcaacataatttttttaaaaaatagacactttttcaccaaaaaaataatgtcacctttttatatccacgactaacaaatatcaatttattcacagaatgatcagcagctactcatgagcagaaatcatgaaagaaatctgactggacagatctaagcttcctaccgttcttatccaaaaccattcagttctatcactttcctcctgtgaatgaaaattttcctcactgcttacgcagggatgaaactatatatagttctatggtactgcaaaatttgtataatcaactgctgatacaaagcaaccagcatgctgaacgatgtttattcgtacttagtttccggaatattgaattacttctcatataagtgactacaacgggatgggatgaacatatacagatatcaaaatgacaccacagacagcaaatgagtctccgactatagctgagataatgtagtatcactttcttcaatctcatcaaattccactggtttcccacaaacaagcttcctgtaaatcaaatatcaaattataaggacatttataaattcatatattaagaatcaacaagttagaaataaaacaacacaatacagctatttcaaaataaaaacagaaattccccaacaaaataaaacaaaatttataaaagcagtggattagatgcaactagacatgccgaagaaatgggtattcctcaaccatttggaatgactttttatccttcaaatgtgttaaactcgacttctatggtcaacaaaaatcaaccattactaacatccagcacattatatatatggaaagcataacatgcaccaactgaaattgtcatttgcaccaaaaaaaaaaaaaaaaactgaaattgtcatttttgtcatggttaacagaaattttacaagtttaaagattttttcttctttttgctcctttaatccttcttatcaggtaaacagatgacaatcaattgttaactagagatacctttgagatataaaattctcctcacacagtgccttatccagcctctcttcaaatggggttgcatgccattttactttctggtcctagggacaatgagcactaatcagaagctgtagatagatttagaaaccttataacaaataatgataatgattacaagccatacctccttgtacttagttgttgaattcgggatgccattgccataccaccacttgaatgacataggcgaatgctcctcgatggttgacacaggacttattctagcagacaaatttgaattgacctcatcatcattttcatttgaaaatttcttggaccctttttctggggtaggagtttcattttgagctttctcaaccaaatcactcagctcacttgaatcttcttcaaggttaaaatctctctccttgagtattttgcaccagaagacattatcacctggttcgttagttggatagacaaactgggaccgaacttgagccttacccgtacgtaactcttctaatgatgcagggtacacagttcctggtgtttgcatctcgtcaaataacttcaatggggtaggataaggagatggtttatgcgcactttggctatttggtgacttgttttccttaatatgccaatcatctgatgagcttccataggttgccaagtcagtttcactttcaaaacgaacagacttgttctttctctgagtatatgtggctagcaaaggtgaaaccaaagctgcattcctttcagacctatctgccgcatgaaggttccctgaccaatttttttccatatagtcaacagagtcatcttcagtatcttgtgctttggagatacagctgcaaaagaaatgaaattaacatctgatcaggttctagtcctccatccaatataattatcaatggacaattctaagttccaaccaacaatcatacaattaagtaattatctaaaatccaaaatatgaaagaaaggatgcaggaaccatttgaagggcactttttttaaagcagaacgaattgtctgattctatattatagttaaaatgcagttgctataccaggagctctaactattgagaatgtatctaaagcttactataaaaattgagtaaaaatcgaagattcacctaccatgcaaattgactaaaatatcagttgttcaaattcattatcattcaatatcagcattgacaaaaannnnnnnnnnaaaaaaagagtcatgaataacctgcttggcatgtgctcaaatgaatccatgctatttcccaatttttggcaaagatttatgggtgttggtggatcaaatggttggacatccagctgcagtttctccacagacgtgttaggaagccaagaatgaaatcttgaagggtctgaatctttatcaggagcaggtgatttcaacttctcagatgctttacgaatttcaacaggtgttcctgctaaggtcccacaagctttaagaaacttagcctgtagaaagagtttatataatgagatcatcaaaattcaattgacaataacaaaatgaatacaatccataaaaaatgcaagaagaaaaaaaaaaaaaaaaaaacaaattctatgagtaacttgaaagtatttgaaatttgatatttaccatggtgcaagtataatcctctaggcattggatacaaaacaggtataacatgaggacacagcagatcatgaaagagtgatagatgactgacttttcacaagccaaaattgaaaaaagctaactaatggtcctaattgtggtcattattcaattgtttccagtatgttttacagaaaaggtttatgaaatcactctattgctttccatgttttttctttatactacattcatgaaggttcgtaaaatttacaatccaaaactgtccaagaacaactaagaaacctatactatgtcagtttgcagattccattttgcccagcttaacgccaattcacaagatgaaaattgaaccttattttactcaatgccctaactagttcaaacaaaaaatacaaaaattaaaacaaccaaacacctgagaaaaaccattaaaaaaaccatttcggctgcagtaatagtgcaataccaatattaatagcactatgaaaatacctcatccttaagcccctggaagtccccctcaaacccaacaccatcaatcctcgcagaatcatctctctcttctaaaaaggttatatcacaaaattagaaaaataaaaaagaaaatgtaaaagccaaaagaaagaaaacgaagaaacaaagaaaagtaccttcagataataaagaagacgagcgatttcgagataccacaacaccctgggtttccacacagcgaaaattctaattactattaaaatataaataaagtaattcgtgaaaacagcaaagacaaatgcgaaatgttacggtggatcgagtggaggagataatcaattgtgatgtgtttatgcggcgattgtctctgatcctgaagcacgcgaagaagcagcccatcgctttggtgaaggatcggaagaagaaacggatcatgaaccctaacacgctcctcagcatatcagggaattcagaaaccctaacttggaattcaattgagaatcgagagacagagagagagagagagagaagtgtgtgtgcgcagtgaggtgccttcgtccctgaagagtcgaatttgaattttgaagcggctcccagcgagggaaattaaattagaattattaatagaatatatattcatgatatcttctaacatactaataagtcagatattaattcgatgcatgcatgtcgctgacagatggatttttttttttcttctaacatactaagtcagaaaccttataaagggagtttaaattttttcttcttcttttataaacgtctaacttttaataaataatgatttttaaaaaattactatttttagtcataaaattaaaactaattattaaataatgataacattaattattatcctaacaacaacaaatatacaattagttttacacaattttatattaattattactttaatcattacaataaaataacaaacacaattaattttacaaattttatactaataaatattaatcgttattataataataacttacaaaattaattttatactaattatcttttatatatatatatatatatatatatatatatatatacattaaatgttccaagagagaagggaccctccagatcttgttggtccccctctaacacaagttctctattaaaatatattgtttttccatatgtaaatgtagtgaattatatattattgacttagtatcacttttgattcattgtgttttgtatttattttattttaatatattaagttttgaaagttttactttggtcctttaaatttttaaagtatctcattttgatcaattctttcgatttttattagaaacattaatattatgttaactttaaaattttgaaataatttaatatagtgacaactaaaaatcaccattatctttattttatttcaaaaatttaaaccacaacaaaagaaaataggtgaaagtattaannnnnnnnnnnnnnnnnnnnnnnnnnnnnnnnnnnnnnnnnnnnnnnnnnnnnnnnnnnnnnnnnnnnnnnnnnnnnnnnnnnnnnnnnnnnnnnnnnnnnnnnnnnnnnnnnnnnnnnnnnnnnnnnnnnnnnnnnnnnnnnnnnnnnnnnnnnnnnnnnnnnnnnnnnnnnnnnnnnnnnnnnnnnnnnnnnnnnnnnnnnnnnnnnnnnnnnnnnnnnnnnnnnnnnnnnnnnnnnnnnnnnnnnnnnnaaattaccataagttatgacacccaataaaaataaggtttcacataacattaaatgacaaagacctatttaaatattctatgcattaaattataaaataacaactttgaccactattccctgatccgtaagaagattacagtcaaaaatatcctccttcaattccatgctcattaatttgttgtagttcaagtattctggtttaacttgttactagatatatgtctttctacaatttagtccacgaaagtctaaagtcactccctttttaatttctaaatgtattttttgtgttaatttaatcctaaatttaatgaaatgacaaaaaagttagtaatttaggactaataagagagtaacttagaacttttgaaaactaaattttacgaatattaaattagtatttttattctatcattgacatattgaattggtaatatttgtttaccattgatatataaatacataatttttattattttcctatagtgttaacaaaatcatataagaaacaatttagagttttgttaaataataataatttaaataaaccaatccatttgtcataaaagaattttatttggtcttccttattttatttttttcatttaagaattttcaaattagtaaccttaatttcttcattcaaaatttcaaaattcgtgtctaaaactgaggaaaacatcatagatgaaacattttccacctgctctatccaatgccattgaagaatgaaagaatatttgagcatttagaaccctcatagaaatagttacgggaaacacatgcttcaacatgaagaaaggttgcaggcttagattagaggtcagctttgactgaagtatttaacttgccgggagaacatatcagtgccaccacagtccacagggtatgtaccaacaattccttccatatttttacttttactttttcttttgccctttggctgtggactttttaaaacatttccttggttgtaaaacgatttcttatttttattaatttgttgaatatactgtattttaatttaatgattttttgctgtcaaaaaaatatttaattcagattttaggattaatattttaatatatatttagtaatacacacacatatatatatatatatatatatgagttatgattttattttcataatctttatttgttaaaattattaaaaatataaattaatattaatagtgaaataatttaaataataataattttttaagttaaaatatatatttaattcttattttttttagatctttgttatttattttgatatattatttgaattaaaatataatatataatttatttaaaaatatacaagttaattaaaattaaaaaaatgcaggatgagctaatctatgaattttctcaaacttgataaaatttccttaatcaaatatgaattgatcatctcaagaaaagactaaagttcaaatctaattaataatgaaaaatacatggttgaaaagagatatctcaataaaaataatcaataaaattaatgaatactattataccattattttgttggaaaaaaaatgataaaattcaataaagatgacaaggttgtgttttaattttaacatataaagaagataataattttgagacttttgttcaaacctaggagtaaaaacaacaagatattaatgcatggaagactaatattggagaacatgaaattaaaagaaattagttattaaaagattaaaaaaatggtattattttagtttcctttatacaaagctaggaatgaggtttttcccatggatgaaatgtgtagaattatgaatgcagtccatgaagcaaagttgaggtttcctgatttggacaggtgataggcattgatgaaagacagatacttcattatactccacgtttccatatctacaacaaagccacctgaaaaatgccacattgccgcgattccgtccttgcattctttgtcgcagtttggtcgtcagttttcacacattggttgctttccgaggcggttttacatagatcctgccgtggttcaaaaactttcataactaccagagaaatcttcaacctctcatcgcaacaaaatcttcagaggaatcaaagaatcttcaaaccttcctaccagttgctggaaccaccatttgtgtctacatttttccaaggtattttaacttattcctaatttttaaaactttgttggttcaattttccataatcttggtcatctgtgtctacattttcttataccttagacctagagtgcttttggatgagaaatttgaagagtgtaattcatttttctagcgaatttcaattgctgtatagtaaaatactttgcttggatagtgtgttcagaaataatttaacagtctaatattttgtacggacgaccttcacagaaatttaatatcttaacattcgtggcattcagaaaattatagtgtttgttaaacttggagcaaataataggagtgatctaattggtattacaaattttgctctctgggttttctattttaaaaatatatctttctttcacctttagcattttgaacaaatttggtggaggatgtgtttcaacagcacagtgacacagtcctcgcctcaaagatcttgatttggaatctaggaaagcagaagaagttggtactttcccattagttttctgggattccatcaaaattcagttttggaattgtagataataataatgtgtaaaaattcatcttttaacgtgaagtgtttgtttatcattttttttgtgtgtctatggtggttgctttgactgaagtttgattagtttcaatttgttctcaaagaaaaggtatctggatttttatcagttatcctgaaatagcttattggtgacttgttggtcatgagtttgaatccggaaatagcctatttgcatatgcaagggtaaggctgcatacaatatctcatcctttacctgcgcatagcgtgaagcctccggacaatggggtatgtagttttttttagtttttttaatcctgaaatagaaaaatctttaccatgcagcatgatatgaagcagcggggtggttgagaaaaatggttggaattgttgcagctaaagatttgccagcagagccctcagggctaagaggaagagtttaggcttggtttgagaagtgggattattctctgtattgttattaattaagttcaatcgggaactgtatccaaggtgagttagatcataatttagtttaatttgcaattttactggctcaggttttggttattccgtcattgtatgttacaatgtattcttttaaggttgcggagagtcctgttgattctgcattgatccctgatgcggcaccattaaaggcatatcagtattttgaaagtaaatagtataagtaaagcattagatacttgtttactgttttcatttaagtaaccaattcatatcatggtgaattcaattgttaataacaccaggtagtcagcacttaattgcagactcttgatagtttaataatgtgttgttgttttggtttctactttctactgagttattggttatattttagggaggaaaatcatctaggattgtccattgcatcctggcaatgaaacactatagtgaatgaaaaatgacatgggcaaatggtgtgtagaaatttggcagaaatctcaaatccattgtctctgcaatgaggaaaaactcagccatttactaattccttattatggaattcatcgaacaatgataaatgccccactgctcttaatctgacattgagtctaataaaatggtaggaaaacttggtttatttgcttagcaaaaaaaatgaaaacttggtttattttgacttttatacctgctttggacttgtctagttgaacagaaagagtaagtgatgaaatattttattttgttagttgcagtgcggttcccattctttgagtatgcttgtacatgcaattctatcagataagaagcagaagaagtttcaatggtatgggaatatgtagctctgtgtttcacagctgaatttcatcacaactttaataatcaagattcaagttacaccttatagattataacttataagtctgttacattacttgaaactctctgtctctattatgataaaaagcttttgaaaattgtagcattatcatgaaagttggtatgagcttgtttcctcgctgcttaaattaatgggtctaagaatttttttaattgatgtcatgtgccccttgcttatgatttgatctgcatcacaaaatgtcaaagatcagttctaccattctttcaaatcttggctctagtttttctttctttatttatgatgtcaagtcattgtctaattacgaaaaacaagacaacagaaatagcttatatagtgttgattactaactaaattaagatcgttgatataatatagtttagcagatttaaaagtgataaagcttagcagagagatcgttcgaccacagagagaggtcatcctccagacttagacaatcctttattcctgttcaaaccagaccaatttatcctatagttggaaactcaggaccaggaggaccaaactttcggcagttggaccaattaagaatgttatcaatttgttttaaatattaggatgcaatcattattctagtacactttggctctatttataagtacaacactaaaaacttaagtgatgttagtgtaacatttttttctttgttctcagattaagcacgctttctgctcttctagcattcattcatgatgatgaaccaagaaagactggaatccaaagccaggagtaaactcttttggaagttcaagaaggaacacaaagctatgggcaacaaatttgtactacttgaaaatgaaaatgtttctccggtaaaaattgtgacacaaccagctcttggaaaaatcaatgtgatggaattgattgagaaattcaacactcaatctgatgagtttatatcaaagaaagcatcacgactttgatttgtactaatgacttgaactctgcttcaagtagcacaaagatatttgcctgcgtatgatatgatacattattacataaaatagacaacaattcttgccgtataaatttcttgattactatgtaacaccacaatttccttcctaacatgcataacataaaaagtacgagcataagccactaacttgaaccctagtggtaaaggagtttagcgaataggttaaaaacttttagattgttattgtaccgaagaagataaaaaggagaacaaacagatctaatatgtgtactgaattctcacttaattaattcaaatgttgaagaattagataagaatggttcttaagtctcgtctcaatgaattgcagaaacttgaagatagattgttaatcagaaggctcgtgatttgggtttttgcttcttattgttgtcactagtccttatcatttatgagaatctaaaaatagacaaaacctgtttgctttatgataaagtcatgagttagagttaagccaaaattccaaaattccttctaggggaatagcagagaatataaaataaataaaaaatgtacggatcaacagcaatgcacgcacggattacttactagtttctgattataattatatttactattcttgtgcttaattagtttattccagaacttgaacaatcgtttgtatttgtggaaaataatttttttcttcattatcagtcttctacgctgaattagaaagatggatatatatatatatatatatatatatatatatatattttgtaagttttttacttttcggaaacaactgtcttcggttctttatatcaactacatatgtataaagacctaaacttaaaagtgacatcacccaggagtcactccagataaaagttttgagtgacctcatattgtcacgtatgaattattgaggatcaaagcaaacatataaaacgagaaggaacgtagaagaaaattcatgcttgtatttctaatttcttgttatcgtatgtataaaaagaagaatacttcaaattagaattaattggttcaggaaaaatatgcaaacaataccatcatcatatgcaaattgttgggctgtagatttaattttatgacaaaatgtcttttacaaaggtagaaatcaatatttggaaggtttaaatacatttgcattttttttcattttcttccccacaattttttttattttattttaatctttgcaaaatatttatttttgtacttaaagcattttagataatatttttttcattaacactatctaaaatatttttaaagatgagaaacaaaataaacatattttacaaggactaaaaagaagaaaaaaaattatataaaaaaaatgttaaattataataacaaaaagtatatttaactctgtttgaaaagggttattacttttgaaaatatttagaactagacagtgattttggtggatcttattcttttttgttaaagttagctttcgaaaattctctaaaaaaattatgtctttgaaatctcttttgactttttcccttcttaattgcaaatatctgttccattccaatccatatatgtatgtaatagtcaaagttgtgcccactcttgtagactttactccgttgttgccctcaaagctaacatcgattcaaaattcttgtcattggcatttcaccttcctcgattaattaacatttgtcctttggaggcccctaaataaattgatatgtatcatcaggtcaaaaacttgtaagctttaattttatttttaagacacacacacacacacatatatatatatgcacttcataatggaaatatttgacttgactccagcagccaaagttcaatttacacaatgaggtcacaaatattaatataaatacatgggaaggaggaaaataataatttacacgttataagaaggttcccaagttttcaagtgttgcacacagactaataatggatgtggccaagttacataactctgatgatgatgatgatgagaaaaaagaagaagttgtgcttcctgggtttagattccatccaacagatgaagagcttgtggggttttatctgagacgaaaggtggagaagaagcctctgagaattgaactcatcaaacagattgacatctacaaatatgatccatgggatcttccaagtaagatcagcttcctctttaacatatggtatcagtcactgaaagtgaaacctattttttgtttctgctgcagcagataaatttcatgagtttggttatgattcttgatatatataattcaataattaaggactagagtgtttgatatatatataaattgaatgaaacaagctaggataattaattaagcttaactaaagnnnnnnnnnnnnnnnnnnnnnnnnnnnnnnnnnnnnnnnnnnnnnnnnnnnnnnnnnnnnnnnnnnnnnnnnnnnnnnnnnnnnnnnnnnnnnnnnnnnnnnnnnnnnnnnnnnnnnnnnnnnnnnnnnnnnnnnnnnnnnnnnnnnnnnnnnnnnnnnnnnnnnnnnnnnnnnnnnnnnnnnnnnnnnnnnnnnnnnnnnnnnnnnnnnnnnnnnnnnnnnnnnnnnnnnnnnnnnnnnnnnnnnnnnnnnnnnnnnnnnnnnnnnnnnnnnnnnnnnnnnnnnnnnnnnnnnnnnnnnnnnnnnnnnnnnnnnnnnnnnnnnnnnnnnnnnnnnnnnnnnnnnnnnnnnnnnnnnnnnnnnnnnnnnnnnnnnnnnnnnnnnnnnnnnnnnnnnnnnnnnnnnnnnnnnnnnnnnnnnnnnnnnnnnnnnnnnnnnnnnnnnnnnnnnnnnnnnnnnnnnnnnnnnnnnnnnnnnnnnnnnnnnnnnnnnnnnnnnnnnnnnnnnnnnnnnnnnnnnatatatatatatatatatatatatattgtgttggagaagtgtatgtatagataaacttaactagcacatcttaattattaattatatggataacaaaagactaattaaatggctcaattgatacttgacattttgcgaagttttcatgtgaagatgtagaaactcgggcttcaataatatgttattggataaaatataaattgaaaatgaagacatagttggtgtatatacgcatgatatgtacatgtagctggttttcaattctaggctagctagttaggtgtgcaactagctagccaccccattttgattttatatatttattgtatggattatttcatgctttctaatctcaagtaattttttgtatatatgctgataactaattaatgtatgaagaagtgagttcagtgggggaaaaggaatggtacttcttttgcaaaagagggagaaaatacaggaacagcataaggcctaatagagtgacaggttctggattttggaaagccacaggaattgacaagcctatatactgtgttaaagaaccccatgaatgcattggtctaaagaaatcattggtctactatcgtggaagtgctggtaaaggcaccaaaactgattggatgatgcacgagtttcgcctcccacccaatggaaaaactagcaataatccacaagctaatgatgttcaagaagctgtaagtcaattatatatgttactctttgtttcgttaatatctatgcatcgttagcctacaaaattttacatatataattaaccaatctgatcatcataactaataaatgacttttacaatactttataaaaatcaataatttaccatatataataataatttataattgaatgatacattataaaaaatctttacataagtgcatacactattttttataatctaatatgacagtacgtttgaaatttcttttttatgttgcatgtatttaaaagaagtataaaatattaatatgtaatgggaaataaaccatctagaaccgcatgtaaagaaaaatctgagataaaatagtcaaacgaccacaacagtttctgagattcggggttagaatcttgttcatactcagaagaccactaacaaacaattgtacttataaattatattctaatgtcataagcacgtttattagaccctaaaagggagaaatgcatatagataaagacacatgaaccaatttatttattaaataatcacatcaactcttctaggctgaaataatttagcaaagaaggacagacactttcaaataataattgtgttgtactgtagctgtatacgtaaccatgtcgaatattgtattaatatttttaattaattgtaatattgtattttttataattttttcaaacttgtctacttaccacaacaattagatgattttttgtattttatattttattatgttcataatgatttgtatacatttttaaaacatgaattttttttctcgtgatttaaatcattactttatattaactttatattaatttacatactatattatagctgcaacgttttctgtaattttcaaattttgttatgttatgtattttatgcatatcccgaattgtatctatacttcctagtagttaattagccttccttatgatttgtagacctaaacttaaaattaaggtagttacttcacttaatattttgttactaaaaaatatttataaataatcttgggtctcaaacttctagcacacatggcatgtacaaatgcatgaaatacccagaaattttggctccactgcctatatatatgtcaggatacgggtgttgcactttcttgtacagcaaattaagtttatactatttgcctattagctaaaaaaattaaaatatatgttatgtatgcttggaatatcttgttttataattaatatattacaatgaagttttagttaagctaaaatccctaagctttcatttatagaattaaataaatacaattaacatattaaaattcataacatatatgttggttcctatatatattcagtctagtctaatttgtgtttgatgacacgtttcttaggtcattggctcgtcaagctcttttgaattgaccgaatgggatttaatagtaattaaataaaggagaaaacaatgaagttaatagtaaactatcatttaaccatataacttaaattaataaaaaatgtaagataaaaaaaaaattgtagaaaaattaatgatcgtgtaaaaacctttatttattttttgacagggtaaaaacctttattatgaactagtgaactacatatcaaattaattatttttagaagtactatatacatgtatctgttttagaaccatctttgtgtgttctagaatcgttttaaaagaccttttttttgtagtagtgatatcaaattaataatttgcattgttggtttccagttcaattatactaaagcattgatggacaaaacgaaaaaataaaaagtagtagtacctaacattgtgctattaatatacttaacgatggtttacgtaacaagaaatctcgcaactaattaaatagtgtatacacttcgacaattttgtgtggttctcatctcagcgttacataaattgcatttatttcattttgtggcatttatttcattttgtggcatcacttaatgcgatcaaccatgtcaactctagcattctgtacctcttttgtttgcaagtttttaagtgtcttaattttttttatgtctttttatttatggggttcgcaggaagtgtggacgctatgccgaatattcaaacgagtcccaacttacaagaagtacacaccaaatttgaaagactcggcagcaccaatcactgagccaaatcaccccacaaactcttcaagttccaaaacatgcagcttagaatctgacaactgcaagccatacttgactttcacaaactcatcatccccacaactcattcaacaaaatgaaaagaaaccagttattaatggacatgttgacgttgaacctaaccacttatttctaggtcaattaggcaatgtagctcaggctccaacatccttggcttactcaagtttttggaatcatcatcagaataataatgtggaatttgctaatgagaattgggatgatctcacatctgtggttcagtttgctattgatccatccagggtttctgatcattgtaaagaattcaatagattttaagagcattttgatgcttaaactactaataacagtaacatagttttaatattaatatctctcagtttgaccaaataggagtattttgttattttttctttggccctcttgacaaaatatattattgtatcaacgggttatagttttgatagtatttgtcatgtatatggtaccctctattttttttatatcaatctcattaggggacaattcttgttcctttttatttgtgtgtctaaatataattaacaaagcattgattatttgatttaattaactttacccgtcgtgtataataacagctgacagtagacattaataaagtgatgttttaaatatttcaatcaagacataggagtttagcttaattatttgatttgaattattataaattttttatacctgtttttgttttgtatcgagaaaaaaaaaacttcaatcaaggnnnnnnnnnnnnnnnnnnnnnnnnnnnnnnnnnnnnnnnnnnnnnnnnnnnnnnnnnnnnnnnnnnnnnnnnnnnnnnnnnnnnnnnnnnnnnnnnnnnnnnnnnnnnnnnnnnnnnnnnnnnnnnnnnnnnnnnnnnnnnnnnnnnnnnnnnnnnnnnnnnnnnnnnnnnnnnnnnnnnnnnnnnnnnnnnnnnnnnnnnnnnnnnnnnnnnnnnnnnnnnnnnnnnnnnnnnnnnnnnnnnnnnnnnnnnnnnnnnnnnnnnnnnnnnnnnnnnnnnnnnnnnnnnnnnnnnnnnnnnnnnnnnnnnnnnnnnnnnnnnnnnnnnnnnnnnnnnnnnnnnnnnnnnnnnnnnnnnnnnnnnnnnnnnnnnnnnnnnnnnnnnnnnnnnnnnnnnnnnnnnnnnnnnnnnnnnnnnnnnnnnnnnnnnnnnnnnnnnnnnnnnnnnnnnnnnnnnnnnnnnnnnnnnnnnnnnnnnnnnnnnnnnnnnnnnnnnnnnnnnnnnnnnnnnnnnnnnnnnnnnnnnnnnnnnnnnnnnnnnnnnnnnnnnnnnnnnnnnnnnnnnnnnnnnnnnnnnnnnnnnnnnnnnnnnnnnnnnnnnnnnnnnnnnnnnnnnnnnnnnnnnnnnnnnnnnnnnnnnnnnnnnnnnnnnnnnnnnnnnnnnnnnnnnnnnnnnnnnnnnnnnnnnnnnnnnnnnnnnnnnnnnnnnnnnnnnnnnnnnnnnnnnnnnnnnnnnnnnnnnnnnnnnnnnnnnnnnnnnnnnnnnnnnnnnnnnnnnnnnnnnnnnnnnnnnnnnnnnnnnnnnnnnnnnnnnnnnnnnnnnnnnnnnnnnnnnnnnnnnnnnnnnnnnnnnnnnnnnnnnnnnnnnnnnnnnnnnnnnnnnnnnnnnnnnnnnnnnnnnnnnnnnnnnnnnnnnnnnnnnnnnnnnnnnnnnnnnnnnnnnnnnnnnnnnnnnnnnnnnnnnnnnnnacattatgtatagttaaatgattgaataaaagaagttaaaaaagcttaaaataatatatatatatatatatttaaaaacaaataaaatccttataaatataatatcacattatataaaatattatctattaaatcaaaagatttcaaaaaacttatattttttaagataatatacgacatatttttttaaaataatgctgagactgggggactaagagaggggaagactccaaaagcccacaattcacaaaccagagatcatagaattaaaaataaacagcttataccaaaaaacatgagggaccaaaccaacccatgacagagattaccaaaaattaaattcctcgatgaaacctataggaagttttacaagagttgtttctatagagatcatctaaaataaaagaaggggaaaaatcccaccaacaaaaaatagaactatacacttcgaaggccgttaacttacctgcataagtgttgtcttctctaaaaatatgggagatgcgaaaattcatcttagaagtcacatataattatatatgcagtttctccatctatgaccaagttaagagacttgaaagcaagagtttccaaagtcgaatcacattctaaccaaaggaaattccaccctttatcatgcgcaagctcaatggctctcatggctgccagcaactaggaatgatgggaggaggacaccccatagaactcaacaaaagcaccaatgaacataccaagggagttcctaaaaacagcaccatcagccgcccttcctgggctgaatatacgacataaaattgggttgaaataacacaagataacacaaacttgtcctcaaaattcattgggtctaatttaacttttttggatacgttaagatagaacaaaacaaaatcttcgttatatttcatttcactcaaattaaataaataaataaataaataacgatataaaaatgtaataaaattcactcactttcataatatttcttccacattttaccaattcaaacgatatccttatatttcattttcatctagacgcatacataacttcgacgtcaacacttataacaacgctccgataaattcgggttggaaatgggaagtgatgtgaaacacttagcaatcccatcaatgctgtcttttttttttttttttttgtggaaacaaaatagctgttaatacaatagttatcccagtaaagggcataacttgaggaggaggtgaaaagagggagtgtcaggttgcaatgattctaaagaaagtcacgcactaaagtactacatcaagttattcgtaaaacatttgtgggctttttactagtcaattcttcaatatttatgatactccatcccatgggactcggaaaagctcagttgtttaattgttgaaggtcctcaattcattgtggataaaaaaaagggctttattcgttgattaaatgttacatatcacagatgatttaccggacagctcgtgttgtattacattatatttacatcagaaaaaaggtattcacttttcagggcaggtcataacacagctttgattaggcaatgataaaatgaaaacaatatggtttacacgctcatccaacaaaatggtataattacattgcctaaagttgaaatttgctctatgttgtatacttgtgaataacatatcagggttgatggaaagagttagctccttgttcatggtggtgattggttcctggctggctaaccacaggaatatccaagctgcttccatcagtttcaggagctacttcccttacatcagctatcctcgcctctgtagcctgaatatcactccattcattatctccaactggttgaatgttcacctgatctgttgccatgtggactacattctctgcagggacggggatggctctagaaacactcaggcatgctttatccacattctcttctgtggggtcaacatgctttgtatctgagcatgactctgtcttctcaaaaacttgagttgtatcaatgtgttgcctgttgtaaagaaaaatagctgctgtcaactttggttttatgatgctccacatttcatactgatatatatattcaaactcaatgaactcataaaaaggcaaataaaccatcaaaagtctccttccatttccctgtttcactaggtattgatatatactatttccatctttatgtttatgtgggaaaacagaagtagccaacaaatctaatttaacaaaacaaaaagcaagggcagaagaaaataaggcattagacatttagacctttgaagttgggcttttagtacattcacatatgcaagaagctcttccttctcttttaacgctgtggattctctctgaacagcctcccttatcctagtttcagcatttgcttctgcaaccctaaccttttcttctgctcttactacagctgcttctaagatcacatcatgctctctagcttttgcaagttcagaacgccacatatttgcttcctgaatagcagcatctctctgcctgattaattgctctctttctttgcttaagcccacaatcttttcttcagactctttcagctaccaaaaaaacaatttaagacaagatgaacattcaagacaatttcattgcaagtaatacccatacatagtaatagctaagggtcaattgtcgaacgcagtttaacgagaatcacttgaatttccatcagccaaaaaatattttcaaatgaaccagcacaatggcataccttctgtgtaaacagctcttgctgcttctcagaatctttattcaaacgctcaatttctgcacaagcaattctccgatgctcatccatagtataagcagcagatgctgcagcctcagcagcttcagcagtctcagagagtttatctgctatatcttttatagttgaatcacgtgcccgaaggtctcgagacaaattctgtagctcctcatccttcactctaagtgtttcctgtagagtggagtagcatcttcagaaccaaaaggcccaagaagacaataaataccgacataaaaacattaaaaaacaaatccattctctatttatatccaccatcctcatttcctcttcaaaatcttggccactacgccccctccccctttaatagatactacaagaggaaaaagtgatattccccaatatactttcttccttttttttgctttcatttctttttctaagcaagtgaacataaatcaaaagtctgcaaacgttagttagccaagtaaacagtgatgaaaagggtagtcctcccctaaccccaaaatcaaaggagtaattcatgcattttcaaacaacaccatgacaaggaaagacaaatttctttgtttaatacatgacaatggcgtacaaagaagccttatcataattcaatttcaaccatattgtgtattttgccacaaccattattgaatgcattatatacaaagtacgacaattagttcaaagcatcacacaatcaaaattcataaaaagaaaattaaaatgttatagctagtaactatctagttaagggtgcatttggttaagctttgacaaaaatataaaaaaaacacacttttctgatatcacttttctttttaccttctaacaatagtactaaaaaaaattcctcagagttttagcttattataaaaagtttaattaaactttttatcactgtacatgacacacatgtttaatctagtccttgcacaaaaagaaaaggtttccaaatcagtccttgtatataaaaggctacccaaaaaaaatagtagctataactctgcagttctctgctgcaccatcacaaatgctgaactatacatttgagcacaagaaagacagaataaaccagaactagattgtaccttcatgattgttaaatcatccataggaccatcagtagtattatttttcatcattcccagagcatttcgcaaagaaatctgcattgccgcttcaatttcttttgaacattccaaggctgtcgaattggctgcagcaacaactgttgcaacagttcctaattttgtagacccattcccacttaaggaattcacagcttctttatgcgcttttagaaccaactgagttgcactaatgtcagatgataaaataaatcagacatcaaaataattacagctattagacaggaaatctgaaatagaaatgatccagcaatcattcaaattgattcactgtagcggaaagcaagaacatcagacaaataataattatagtaaataataacaaaagtaacataaatataaaggctgaattatgacatgacattagtattctgcaggtctccctttccaagcaaatgcctattcaaatgaatataaaaacacactgttcaaaagagttagaaaattgtgaaggactgcagttatgacttataaatcctcaataatttgaaacatgacaaagtaaacaaagttttgtaagataatagaaaataaatgataaaactcaaaacaaatgcattagtacatttaggttcaagcatgcagtatttcatttgtaagctacacctctttatacacttttgaaatacaaagggattataacattcatactcatacattcgacaacataaaataaaataaaaaggataagattatattccttggaacttgccccagagggaaatgggagataaaagtgtgggattatattggaaaaaacccaagtcccacatcagtcagagatagtgccaaaatataatatataagtgaggggaaaccctcatcccatgaactaacttttggggttgagttaagtccaaactcatattctaagatgtcctagatccattaaaaggtttatccaccatgttacctacacaccaagtccaaaagtgctaagcgtgagggggtgtagggaaaaacccaagtctcacattggtcaaagatagtgtcaaaatataacatataagtgaggggcaatcctcacaccatgagctaactttttgggttgaattaggttcaaacctatattctaagattataaaacttactgtaaagttgacacccatgctctagctacaccaggagtctccgcacagaggaagtaatcctttttctgtggtgtcccaatatctaaagaagccaattaaggtaacaagcagagtgacttccatcaatttgctgcaacatgatgattcataagtagtaaatgcgataaaaaggatacaaaagcagcacccatcgtactttggaagcccgctgtaatacacagaagtaaataaacaaccatgtcaatataagaaaattcatgcaacaaaacttcataaaaacatctggaaactagacaaaataggcttatgttaaaaacaccattcttactggaaattcacaggagatatggtgatggtgctattggcatcaaatataatcgttcctttaacagaaggttcatttcgtcttatcctaaggaaaggaaaacattcaaaacaatacagaagatcagtaatcaaagtgattttccgtttccccacacaaacagaaaccaatatgcaaacacatacttgtattccattctccccgttgtcgggtccaagatgacccaacgctcgttccattttctcagctgtgaacacaaaagcgattcttacatgaactagctttttttctttttctttctaaaagcatcaatcaataatatttggctattcaaacgattataaaacacgtaacaaaacagaacgcattggaattataacagaacatcgaataagaaattaaaaattggaattgggaaaagaaaaggagtaaaggcgaaaataaagtgaaattgaagtgagaaataggaaataggaattgagataaagggagtgaatgaattacggtttcagatctcttgagaagtggtccttgcaacaggtttctaccggaagcggaagcgagctggcgcttgatcttctccaagctattctcggtgttttctgcagctcgctgtgtcattgcaaattcagctcagtgttattaacagcgattcaaaaatacacaacacgcaacgagagtgagaaagagaaggtggcgattgatgagttaccggagaagccatgagcgtagatcaagactttgtcggaagctcaaacacaaagggttttgggtgatattcccccagatttgcgtttacgagtgtttgttttttactttttacaagaaaatattgaaagaagaaaaaaaaaaagtttaggaaattaaattatttaatgggaaagaccggtaggttattatttggcatactgacttgcagttgtgcagttagcttcacttttttctgtgttggtcaggattaataattttaataaaattaattttgaataatgaaatacaattaagaatgcatatttaaatttattttgtgaatttaattagaatgataccacagtgtaaatatttattatgcttatcatcgtctgttgtgtataattaaaattgttgatttttataataattattttgtaattttacttaaaatgatttataatcagtttataatttaaaaattaaaaaataaaaaaaaaagtttataatgtaaaaagcctttaacaaagagtgtattaaaattaaacactaattttatattaaaaaaacatgattttaagttttttaaacattttcaatgtatatagttacactattaattaaagtaagagtttgcattgataatatcaagaattttacatcacttgacacgtacttcttgttctcagtttggctttctattaataatacatcacttggcttataaaaaaaaatataaagatttttatatcatcaataaactagtattttannnnnnnnnnnnnnnnnnnnnnnnnnnnnnnnnnnnnnnnnnnnnnnnnnnnnnnnnnnnnnnnnnnnnnnnnnnnnnnnnnnnnnnnnnnnnnnnnnnnnnnnnnnnnnnnnnnnnnnnnnnnnnnnnnnnnnnnnnnnnnnnnnnnnnnnnnnnnnnnnnnnnnnnnnnnnnnnnnnnnnnnnnnnnnnnnnnnnnnnnnnnnnnnnnnnnnnnnnnnnnnnnnnnnnnnnnnnnnnnnnnnnnnnnnnnnnnnnnnnnnnnnnnnnnnnnnnnnnnnnnnnnnnnnnnnnnnnnnnnnnnnnnnnnnnnnnnnnnnnnnnnnnnnnnnnnnnnnnnnnnnnnnnnnnnnnnnnnnnnnnnnnnnnnnnnnnnnnnnnnnnnnnnnnnnnnnnnnnnnnnnnnnnnnnnnnnnnnnnnnnnnnnnnnnnnnnnnnnnnnnnnnnnnnnnnnnnnnnnnnnnnnnnnnnnnnnnnnnnnnnnnnnnnnnnnnnnnnnnnnnnnnnnnnnnnnnnnnnnnnnnnnnnnnnnnnnnnnnnnnnnnnnnnnnnnnnnnnnnnnnnnnnnnnnnnnnnnnnnnnnnnnnnnnnnnnnnnnnnnnnnnnnnnnnnnnnnnnnnnnnnnnnnnnnnnnnnnnnnnnnnnnnnnnnnnnnnnnnnnnnnnnnnnnnnnnnnnnnnnnnnnnnnnnnnnnnnnnnnnnnnnnnnnnnnnnnnnnnnnnnnnnnnnnnnnnnnnnnnnnnnnnnnnnnnnnnnnnnnnnnnnnnnnnnnnnnnnnnnnnnnnnnnnnnnnnnnnnnnnnnnnnnnnnnnnnnnnnnnnnnnnnnnnnnnnnnnnnnnnnnnnnnnnnnnnnnnnnnnnnnnnnnnnnnnnnnnnnnnnnnnnnnnnnnnnnnnnnnnnnnnnnnnnnnnnnnnnnnnnnnnnnnnnnnnnnnnnnnnnnnnnnnnnnnnnnnnnnnnnnnnnnnnnnnnnnnnnnnnnnnnnnnnnnnnnnnnnnnnnnnnnnnnnnnnnnnnnnnnnnnnnnnnnnnnnnnnnnnnnnnnnnnnnnnnnnnnnnnnnnnnnnnnnnnnnnnnnnnnnnnnnnnnnnnnnnnnnnnnnnnnnnnnnnnnnnnnnnnnnnnnnnnnnnnnnnnnnnnnnnnnnnnnnnnnnnnnnnnnnnnnnnnnnnnnnnnnnnnnnnnnnnnnnnnnnnnnntgaatagttttaaacatataaagtatattttaaatttgtaataaataatttatactgtgatatagaaatattttgaattattgataatttttataaaaaattgaaatttaatttaaaaataaaaacaacaataatattttgaaacaaataagatgttaaaaataattcttaaaaacatttttattgaagaaaaacttctagaaacactttcgaagaatttgaagaatagatcttccacccatccccttcactttccaccaaccaaacaaagtgtatttttgttttggtaaaattaaactttaggagaaggaaaatgatgttttggtacaagacacaaaaagttttgtgcaaaaatagagaaagagagaagggagaaaaaaaaaaggccatacaccttttaatgaataaacaatcaatttagttttaaaaatattactaacattaaggaaactaatttgaagaaatgttcaatactaaaggaactatatagcatgattttcaatgctactctaatctgatctatatgacacggtaggaacaagctcacttgggaaaacaagcgtccaacagcttttcagattattttttaatgctaaacaatgtttgtgtgattggactcaaacaaaaggtttcaataattatgctaatacaaattaaaagactattttttaatgctaaacaatatttgtgtgattcgtcaaatgcaacaacattaatgccgccttccatgtagatattaatagcactagttggggcatttgttgtagaggcaaccaaggcaatttcaaagttgcgatttttgacagtgaaggtcagttctttcctattgctgaaagggaggccttggggtcattgaaagcccgcaaatgattattggagaatcacttttgtagagtgatttttgaaatggatagtaagctagttgtagataagatctatagtatgacccaagatttttttgagctgtttcattattcaagagtgcgcatacatactcaccctcaatccaaactatttgatgtagtttatcaagaggcaaacagactttgtcactcattccattgcaagggtggcaaccgattatgctagtctcacaagttttgaaagtatagatcaattacctttttgtattcaacaggtgatcatcaatggaagttcttaagtttgcttttgcaaaaaaaagggagtacttgtatttaaacactatttaagagagaggatgatgcttcaaaaacaaagtaaatggtttattttgcttttttattttcttacttaatgagtgagatttttaacgatataaataccttattctcgatataattgatttacttttgttcataattcacaatagacttgttttggttttgagtgagaccaagggtattcctcaaaaagactaataattattgtagttggaacaagaaattgtacacataatgagaatcaaacatatattatatcgttaaatagatcatcacactcatgtcatgggaatgtaacatgacttataccattgtactcatagttgtgaaatctggttcggtcattgactcgattgagatagtggaccatgaccctggtttgacccggtatattattaaaattttaaaattatatatgtatctattatatataagtatataactaaaattatttgtgagtaagaaagatccatattcgaaaattaaaattaaaaaaatccaattttttcaaaaaaaaacgtttccatttttttttatactagctggatcggatcgattcaactgggatccggtaaccaacctgaccggatttagccaggtcaatccagatcaactatataaccagcccgaaagcgaaactgacccgattagaccaatggatcttgatctgacctatccaatcgaccactctaaaccaatttttataacactcattgcaccgaccttgttacaagtcacattagattattagattgttattaaattattagattgttagtgtatataaaaaaatcaattttatatataaaaaaatctaacttaaaatatattttaaatttcttattttttattaaaatttactttgatcgtttacttttaaaaatcttttatctctcaaatttaagtcaatattattcttccaaaataatgacaaatgagtaaaaatatattttagcagaaaacgtattatttttttctttctgaaaatcaatttttcccacctttctctttttcctattccttctgtctttcattttttttttattgtgccataatacagtgagtggatgtatgtgtatcatgtgtacttctgaatttaaatacagagtatcatctttcagttggcgctttttcattgtaaaagcaaaaaccaaaccctagacaaacgcccacgtacagtctcaaattaattgacagcaatactgatccaagtccagctctttcatccttcacttcactgatcaggcatcgaatcgaagtgaacatcactgtactcaagttgcacaataagctcagcattttgtcaaacagaaagcaggcgacgataactaatgggtgggatattgaagcaaccgggcgcgtttgcaatcacaccgcacaaagtatcactctgcatacttcttaagatctacgctccacccgctcagatatcggtccccttccctttcgcttccgttgctcagcacaatcgccttggcttgttcttattagccctcaccaaggtctccacttttttttctttcattctggacaaatgaaattgcatttcaatcaattctaccattttgaatttgaatttgaatttgaactcatcacactctggaaggagggatttttggtctagttgtatcgcaagcagcttgtgctaaatagtgctcgttttttttcttagcttctcgccttgtctgttttctcttaccgggttctcagtaaatacttgtagcagaagaaattaagaaggtagaatgaattaaacttttcccataagttaaaattattatgcattggctaagttatataagctctctcatttagcttctccaaagtccaaaagctaataattttaacttacacataagctaatcttaacttatgggagaagcttaattcatcttaccttcttactttctcttattgaagagtctattcaaataggatcttagttatctttgggcgtagtgccagtggaatgggcatgctattttaattgtttttagcattcccatattgtttgggattttttactaattcagtgttggatcacacattttcttcatactggtgtgttgaaaatgttgttaataatgcagtcctgcgattatatattggagccaaaattggatgaactcatccatcaattgagaatgatgagccagaactgggaggcttcctgggttattgatcagttgatgagcagactatcatctctgtcatcacctgatgatttgtttaatttttttagcgatatacgaggtgagttgatcagctttaatatttgctagcctttgaccctttttcttttttatatgttctgtcttgtttgattctgatagaaactggaccaggcttctatcagattccgtcttttatcctttttattttacttgcaagtagcagcgcatttggttattgcctatacgttagatcaaatttttcatatttactgatagtaagatgtggttcaggaatacttgggggtcctgattcaggtgctgtggaagatgaccaggttattttggacatgaacagtaacctggggatatttcttcggcgttgtgttcttgcttttaacttgctatcgtttgaggtatgatgttttctgcaatcttaagatggtttaaattgatcattgtttgaatatttatatgatcattatccatgtcaaaaaaaatggggggaggtgaagttgtcttctttgaagctccataatattgctaggtgcttcgaacaaagtattgttgtctcaagtaaattctaaatgatacctttgaatgagtttacattggtattactaaaattcgtggagtggggctcagcacctgttatcctttgttttcatgatgagcatgttgctattaggagtttaatgtacaattttgagtctctggttaatttttttttcttactcttttctcatatgcttagtttatatgtgtaattttcacttttcttctttagaataaaatcttatcctcctcataacctctaatttgggtgtccagggtgtatctcatctcttgacaaacctcgggatctattgtaaagaagaattctcaaattgtcctgcctatgaagaacacggtttagatgattctagtagtaatctggagacatattcagaatatgagaatatggacctggagaactttgtctatgaaaaggtttcagaagaaattgaagcaagaaaggaggctagtgaaattgttccattccatcttcatacaccgaacactcttctgagcttagttgatggtataaggatctaatttaattgggctgcccttttattgttttctgtagttttgaaagcactcgaaaaatctagaccaggatatttaaccaattttccaaatctgttttctgtttctacacttgtttatcctgcacttctcttttgggtttctctatttatgccttgctcttggaaacactgtttgacacaatgacataacttcactgataatgttggaactcacatgcacagatattgatgtgcctgctgattcagtatccaaacagagtgagaaagttagagtagctagtccttatgaggatccttcaagtaacatgctgcgagatgttgatcacagcagcgcggtatttctgcggacaaactggcaggtacaagggtacttgcaggagcaagctgataccattgaaaagtaacaacttgtaaacttagaacttcactgattttttttttttttttatttttaaaattaactgtaatagtgcatgcaattatattaaatttaaagttttattcatatattgcaggaatggtagtgctgtatctttcaatgggcttgaaatcattctacggcaactacaaaagttggcacctgaacttcatcgggtaagtttattagatttttttaatactattccttcaatatattagattttttttttttcatttttgctgggatattgactttcacttcaatccaggttcactttttgagctacttgaatggtctttctcatgatgattatatttctgctttggagaatcttcattgctattttgattacaggtaattaagcggttatttctttattcaatctctttgacggcattgccaatgtttgggttcacttgatgactaattacatataaagcaagcagaaataatgcatcattcatttgtggcagttcattgtcaattgatattcattgctacctcaataaccacaattgaccctcatccaacaaaattgttgacattgctagtctgtttgcgtgctactgaaggccattattgtcttgcctgcattctacttttttctaataaccttattctcttcatcttcaatttgacattaaagtttccctacataaattgtaaaccttttccttcatccatagattttgtcttttgctttgaattatagatctcataactatatttgtcctgtgtacatacccttaagggagtgacttaatagccaataaaaaggatagaggaacatcatattctgcaactgaacttgtctgttatttgttggacaaaagtgcagggactgaaggatttgattatattccttcagttagtggtagtggctttggaagatatgaaattggattattatgtttggggatgatgcattttcactttgggcatccaaagctggctttagaggtaaatttttttagcattttgattttgatacgtgctcagcattctaccttttctaatcctcaaggcttctacaatttgtattattttgtactccactagtcattaagctaatataatactatacatttttttggtgtcacttatattggtttgtgatgtttaggttttgtcggaggcggttcgtgtttctcagcaggtaatcatacaaaaataagttttatttattaaataaaattgtgaacatgtattcaccaattattgcaaaacctaagctgacaacaaatgttgcctgtgcatgctatgctacaaggggtacatggcaacataaatgttgttggcaaatattgccatatgttgtgctgtaaaaactgacaattttcatttgtgcagcaaagtaatgatacctgtcttgcatatactttagcagctatttcaaacttgctgtttgaaaatggcatctcaagtacagctgcgacactaggatcgtcatactcaccttttacaagtataggtatttcgctctctgttcagcaacaattgtttgttctcttgagaggttctttaaagagagcagaaagtttaaagttaaaacggttggtggcttccaatcatctggcaatggccaaatttgatctaacggtaatgaaattttctgactactttagactaaacattctctttatactgctagtactttttctttatgaatcctaagcaataatgtaaatctttgttgtggctttagcttcttaaaatattcaagcctcaaatatattgacctgttagtataagaatatagtagagacatggaattgtgcaaattccagataatcaagttcatgagttacactgtggaacgtgagaaagagttatagtgagttgattaagatgagacctgcatttgagagtgtttgggtttatgccagggaggtcaaccatgaaagctttatgtctactgcagggtgtgatgtatctatactgaaggaaacaaaaagatccttgcataatcatcattgagatagatagagtatatgccaggatggcactagaagtcttatggaaggctttagcgaaggattgactttgaatccatattaatgttaaatggattgtaatagagttttatatgtggtactggactttccttgatatccgattggttagctatttaggattgaaatttgcttaaaatttgatcatgatacatttacttcaatctatcattaagtttgaaccctaccaagcaagaaagcattttttggggtgggaaaaatgtttctctccctgaaaggatcgagagcctaaatctgtcatatgatctatatcttaggtacgaactccgtattttattctctcaagtctcagcacatgctactgctcttgtttctattgctaccatgttgaagttcagagcactgctttgagcattccgggttgcaaacaaacaatcacttttttgggatggaacattcccatatgtgggataaaacataatagggatataagcataataggtgacactttccattattccatcagtttaccttggtattggatgtagttattgggcacattgaatagctagtgccttagtgtatgctttatgctgacaatacatgacagacatggttgtagttgatgaattgagagaaagaatgaattctaaacttgagtcatggagagtagctttggaatgaaaagatttttgggtaagtaggagtgacagagtgagacacaatgtgtggaatacaagttcaatgagactcaacttgagtgaacaatttcttgaagatgaaaattagggatcagatacatcatactcgatgttgcacggtttaggtgtgtcttgaaatatgactgtaattctaataaattttaggatctcatttgttaaagttgaatccatagtccatgtaccttacatatcatcattatttttcttatataagttatttcaagctctaccaacttaaattagatcttaagtcctgttagtgagtaatgaaacttgaaatttgtcttatgccatttacatcatggtaatatcttgattgcagcatgtccagcggcccttgctatcatttggtccaaaaacttccatgaagctcagtacttgcccagttaatgtttgcaaggttgtagaaatctttgtgattattctttggtgacagtttcagaacacaagaattaaattctttgcttaatctattttcttcttatatggctggcaggaaattcggttgagttctcatcttattagtgattttagctatgagagttctgcaatgacaattgatggtgcctttagtacagcttggcttaggaatttacaaaagccgacgggttctcttgttttgtgtcaagagaatggatctggcaatagttctaatgcttcccaattcattgcacaaccaacctcaattcctggatctgtgttgcaagtattgggttcgtcttatatacttcgtgcaactgcatgggagttatatggcaggtaaagttgctatttgtgttgagatatgtttatatgaaattctgaattaaggttacactaattattgttctatctttttttttggaaattgtcaactaacatggtataattgattaaaatttcattgctttaaggctaacctattaataaaagaaaaataaaacttgctgtaacaagctggcattgcttttcttgtattttttttttttnnnnnnnnnnnnnnnnnnnnnnnnnnnnnnnnnnnnnnnnnnnnnnnnnnnnnnnnnnnnnnnnnnnnnnnnnnnnnnnnnnnnnnnnnnnnnnnnnnnnnnnnnnnnnnnnnnnnnnnnnnnnnnnnnnnnnnnnnnnnnnnnnnnnnnnnnnnnnnnnnnnnnnnnnnnnnnnnnnnnnnnnnnnnnnnnnnnnnnnnnnnnnnnnnnnnnnnnnnnnnnnnnnnnnnnnnnnnnnnnnnnnnnnnnnnnnnnnnnnnnnnnnnnnnnnnnnnnnnnnnnnnnnnnnnnnnnnnnnnnnnnnnnnnnnnnnnnnnnnnnnnnnnnnnnnnnnnnnnnnnnnnnnnnnnnnnnnnnnnnnnnnnnnnnnnnnnnnnnnnnnnnnnnnnnnnnnnnnnnnnnnnnnnnnnnnnnnnnnnnnnnnnnnnnnnnnnnnnnnnnnnnnnnnnnnnnnnnnnnnnnnnnnnnnnnnntttttttttttgctgtttttaaaatgagagtctaacttttactgaattttaatccatatatcaatgttctattatgttaaaaccttgaatgtgactgttatttatttggcaacaacaactactccttccctttgctatataattataggttgagacttattggctgtgttagccatatcaattgttgggaaaggtgggaaagattattcatgggtcacaatgcttgaatataaaaaatggaagtggggatgtaaaaatagggccaaaacttggaataaatatataataaaggaactaataaattggaaagatgttacacacaagcacaccctctgctaagagatgacatagctggttttattggagcatttatgtatgggtgagtacaagtgtggtaatgaatgcaaaagatgaacaacaatcatggcctgaatgaatttttggaaagacattatccttgcagtctctcttctattgtaactattttcttaatcttggattgattttctgtcaaatgattttctttctcagtacccatcaaaaacattttaatggtattgtgccattctgtgtagttcttcatgtcaagcttctgggaagtgactatttttcccttttatggaaccaaagtttaaaagaggaaaattatccactttaattgaagacaaaatactcgagagagagagagaaagagagagattcagacacatacacacacatatctctgtaatattatattcttaaaataaattagcagtcatttctatttataattcatcagtgaaagtaaaacattttagttgctattaaggtcttgcttaccaaacattcagaagcaaagttcacccaattttttctattttagggtttaatcaggtgaactatggttttcaaacacagctggatacatcataagggtatactaggttccatcttgaccaaaattccttaagccctggttgtattttaccaaagttatgtttataaataaaaagggattgcatgctttatctttgcagttttttaatatcttgaaagtttgctgtatgtatttcacaatctgattttttttttctttttcaattgtcattagctcaccgctgtctcgcataaatgcgctggtgcatgcaactcgctttgctgatgcatcaaggtagtttctgagctgaatatattacagagatcacattctaagttgttattatcacctttgtttattatgaaaaataactgtatcaccaccattttgttaaaattttctgttgaattatcttttggtttccccagctcatcagatgcagcattagcatatgtaaagctcattcaacatttagcagtatttaaaggatacaaaggtcagattcgttgcataaaattgaatagaattccaccattttttttaaatattgtatgtgattgttttcaaatttgcatttgttttatcttgtttttgtacttttgctaatagtttgtaagttgccagagtaactttttataaaaaataatatgataaattcagcttaatggcaattatttgctgtgcaaattgcattttgttaatacagagttgtcatttttcttcatcgagattgttgatagtggatagaaatgtccactatcacccattcgagttccttacctttgatccctcttattgttctgacttcttcctttttctttgtttctagaggcctttttcgcccttaaaatagcagaagagaagtttctatctgtctcaaaatcgcaaatcttactgctaaagttgcagctgcttcatgagcatgctttacatcggtaagttacctagttcatttgttgtattaagaatcttgagttgtgttagcatctgcaatttcagctcacttaattgagcatcatgtagtggacaattaaagctagcccagaaactgtgtgatgaacttggtgttttggcatcacgagtaactggtgtagatatggaactaaagacagaagcaagccttcgccatgctcgtacattgcttgcagcaaatcaattccgagaggttttttttagtcttcttctatgtactaaatattaaactatatacagaaaatcaatcacacactattcacagtttgattcttgaatttatagtgcatacattactattgttcttttgttggaaacatgggatcacactcttcaaatatattctgttttacaagtgtccttgtactatatcatttaaaaaaaagccttaggttgaacaagggatcataccctttgagtatattctgttttaaaagtgtccttgtattgtatcatttgacaacagcataggatttgtagatttcaagcatgctgtatgcaatgctgttattgttatgtattaaagtacagtatgtggggatcttagcttccttgccccataaggagacaaaagggtgaaatcaatcactgttacctaacagttgaacatttaaaaaatttactgtttaaaatctgtatagattgcttttaattttcatataatgattcttttaggcagctgctgtggcacactccctcttctgtatgtgctacaaatacaatcttcaagttgagaatgcttcagttcttcttttacttgctgagattcacaaggtaaattatcatattgtctaacacacttgttagtttcatgtggtgtggatcaactatcaaacacttttttatttcattttgctttatctgtatgatcatttttttttcttttctttttatgcttgatctatgtctcatcctaaattaccggcaatctgctacattgtcccaaccctagctttcacattgttgtgttctctactgttttttattttttttattttttacttaaagctttcattcatttgtttttatcagaaatcaggcaatgcagttcttggtcttccatatgctttagcaagcctctcattttgcctctcatttaacttggaccttctaaaagcttcagccacacttactctagctgagttgtggctctctcttggatcaagccatgcaacaagggctctaaaccttatccatggagctttcccaatgattcttggtcatggtggtttggaactccgctcacgtgcctatattgttgaagcaaaatgctatctgtgtgattcaaacttcaatggtatgtcgctgtaaatagttgatgttagactatgctcttcaaatttgttgtctatccatgtatatttaaacatatgctgtttttgcaagtatttcaatacaatagccgaatttctgattctttaaaaagataataatcgaatgggggaaactagtttccccacattttcgtcatagttttctgagggtgttggtcctttttctccccccttgttggggctttaactgaatcttacttgactgatttgaatttctttttcagtctttgaaaattatgagattgtgttagattcattgagacaagcatctgaagaactccaacttttggaggtaagcaaactttctgccttttaatcttttttgtgtaatcccttgtgagaggaagaaaaatgagaggtcatgtgaatgaatctgtgtgtcttgactacacagtggaggctcatatttgtaattagaactacaaatacagtagagaattgtcatataattatactactcataatatccctaatttacaatacttctttaacactatattacataattacaagcttccgaacagtttttattggtcccttttcatttgtaagcctttttgctgcatctctgcctcccgtcaaagttcacttggatacatgattgcatgcatgtgatagatactagagtattgtgtgtgtgtaaagcgtaaaatgaagtagggttgactgttacaatgaaaatccagtgcaaaccaaaagcagaggcatacattatattcgggcatatagatactagataagtgtttatcaaattggatttatggggtcttaatacattcaagatttatgttgtgatggtgaaagctcactagtcaactagtaaaaaaatttcatagtaaaattgactcatttaacccattattttaaacaactcttcaacacccaaatccctttctattgctttttatttaagatttgattttcttgcagtttcatgaactggcagctgaagctttctatctgatggccatggtatatgacaaagtggggcaattagaagaaagggaagaagctgcagcttcatttcagaaacatattttggctctccaatcctcaagatgaggatgatcctcttgttagtgtgttttgattgttctttatagtttatacctaattttatctatataagcttatttaattaaatttatgtacaatagtgacccctgatcttctgtaattatcattcaatagctgtagtcattttgtttccaattgtaaccatagccaagatgtacggtggcataaaccttggagatattttgttctctcttccctttatagaggacaaccgttcactaatggacatacaaacgacaattagattatttatcattttaaaagattagatattttttcttaaattattcttgtgtattgaaatctccgccacatggaatgagataatattaattatgaaagtataatatagttaataaaatttatatttctttcaaattaagagtatctaatgatttattttaaaattcttacagaaaattttcaattagacatttgtaccattagagaaaaactgtaggactcatttgtttattagattatttctgctagcaactgactcttttatacatttcatttttacattcctttcattatgcattattaacagtagattgcatctcttaaaaaaaaaacattagattgcagtattgctttggaaatatggaattataatgttaaaatattttaacgaataacgatgtgtagcttcaagttcaagaaacgttatacagtgcattaatgtttgaaattttagtgtataaataacgtattttttataatactttttacacaacaattcttttaatttttcttatcttatttcatttaactgttctcttaaattttcttatctttatttcctttctttttacacacaaatgaatcccaaaaacacattgttgggatttatttgagttcttaactttaggaactaaagtgacatgaatatgtaaatttaaagactaaattgactacttacaactaataaaaatagtacatcggacccaccctacttcaactcgtccataatattttagttagtacgcgcaaatctttatttgctgaaaagaatagcaacacattaattttttaaaactgcaatctttctataaagagaatatatactaatttactagatgagtatattttaatatattaatatacttcaaaaatataaatataattcatatttctcaattaattataaaagtactgtattattacttgtatgcaaaatattttttattaattagcaaaagaaagacacaaatgggtacccaaaatcacatacagtgccatgtatatagtgtcatatatataccaaatatataataatttttttaaaataataaaaaaaaaaaaacaattctagaagaaaagggtgtgataaagccaagagaagcgtgtgaagaagagagagtggaatgtaaggtgtaggtgataggcatgtaataataagcaaaaaaagagtccgaaaggagtacatgaacatcatccaatccatccacgtcgaaacagtgtcgtaatctatttccatttcttctctatcttcacttcctcgtcctcatcctcatccacacctattctcaacccaaacgcaatgcaaccttatgcgcccactccccgcaactcccattccccttatatatcacaaccaccaacctcagaaccagcaccgcaccaatgccattacccaattccaataccatgtgcaatcaaactgcctttcagctccttggtttcaataacttcgtccgaaccaatcctaaatcggaccgctttcaagtcaaccgcttccaccacatcgagttctggtgcaccgatgctaccaacgccgcttgccgattctcttggggacttggaatgcctattgtcgcaaaatccgatctctccaccggaaaccaaatccatgcctcctacctcctccgctccggcgacctctccttcctcttctccgctccttactctccctctctctccgccgcctccgctggtgcctccaccgccgccattcccactttcgacgccgccacctgccttgccttcgctgccaaacacggcttcggcgtccgcgccatcgccttggaagtcgccgacgccgaagccgccttcagcgccagcgtcgcgaacggcgccgagccggcgtcgccgccagtgctcctcgacggccgcaccggcttcgcggaggtgcgcctctacggcgacgtggtgctccgctacgtcagctacaaggacgccgcgccgcaggcgccacacgcagatccgtcgcggtggttcctgccgggattcgaggccgcggcgtcgtcgtcgtcgtttccggagctggactacgggatccggcggctggaccacgccgtcgggaacgttccggagctcgcgccggctgtgaggtacctgaaaggcttcaccggattccacgagttcgcggagttcaccgcggaggacgtgggaacgagcgagagcgggttgaactcggtggttctggcgaacaactcggagacggtgttgctgccgctgaacgagccggtttacggaacgaagcggaagagccagattgagacgtatttggaacacaacgaaggtgctggtgtgcagcaccttgcgcttgttactcacgacatcttcaccacactgagagagatgagaaagcgaagtttccttggtggatttgagttcatgccttctcctcctcccacctattacgccaacctccacaagcgcgccgctgatgtgttgaccgttgaccagattaaacactgtgaggagcttgggattcttgttgacagagatgatcagggcactcttcttcagattttcactaagcctattggggacaggttcctcattttctgcttctttttatttacatttctcttttttatccctgctaaacaactttattataactcaaatcttcaactatcactgaactaatcactcttaaatttacattaaactgttccttttattctcctactttgttagcttctttttttttaatttgattttcattttttaaaaattttaattgtacaattatattctattaattaactttcaataattaacaaatgatggtacagtggagtgttatgtcagaatggatgtacttgatgtagcagttcatcagagtgtttcccctctccaaattgtacttatgtccctttcatgagataaaaagtttacgacattgaaaaaattgatagataaaattgcaattatatcttgaatttatttatcttccgctttgaactgattgaaagtggtaaaagttagattaacaattttacagtttgtgtgttggaggatggtgattagttaaatgtgttttgtgttgaattgacaggccaacgatattcatagagataattcagaggattgggtgcatggtggaggatgaggaagggaaggtgtaccagaagggcgcatgtgggggttttgggaaaggtaatttttccgagcttttcaaatccattgaagaatatgagaagactttggaagctaaaagaactgcgtaagcacattggaagaacacaaatactcctttgttgaaatgattaatgaggaatcgatgtggcatagggtgtttatactctaatacataatagaattacaaggatagtgtcttcccttgtatgaaaatcacagaaactttgatggatagtatttttctattaaatactttgagagattacttgatttgtttcctctgacggatacgaggcgtccccaaccacaactttatctgccctgcttgtgaagtgcactttgggggattccatgagtaactcatcttgattctccctgttccacagcatcctactttttgcaacatcatatcatataactgattatggacctgttttgttgaacttctctataaatatttctagaagaagaatttctagaagaagaaaacaagaagaaaaaaataaaatgagtttctctataaattaaaataagttttttattaactaatttgtaaaggttatctcatcttttaaagaagatatattattgagcttttaaaaattagttaatgaaaagtttatttttatttatgaaaaaatttatctcattttttcttcttattttcttctcttaaaagtgtttctagataaagttatccaaatatattctatgtataatagcataataatatgaaaaggatgaacttttttgagtgtatgagttaaaggaaaagatacaaagaaagaaaatgacagatgtaataaataatataatggaaataaaaaaaatgaaaaagataatgagtatatgatgattataactcataataatgtcggtttcatgctatttaacataattttttagaaagaaaaaaaaaagtaagttctattcattaatcgctatccacatgatgttgcgtaagatacgcaccaaactgaagtttaatgcatttaattgcatcaagcaacaatcctaactaaactttccagatgtggtgatttttatgatatcacaagttttcctgacagagaaatgataaggaatatggttttgaaccttgcatagttcaaatgtgtttttgtagtgaatccaagttctcatccaaaggaagagaagctaaatatataacaatgatccaatgaaactcaattttcaactgaattacaatgccacaatatttgttccttcacacaaccatggaggtgtacaataatatggtgctctccaacagcaagacaccctaagatcacaaaattcctgaaggaaaaatttcagcaagtaaaatgagaaaatcctcatttgaagtggcattgtcaaactcagttcctgcagagacaaatcaaacaccattacaccagtagaaaaatctgatacaatatataaacctggatccaagtgagtaggaactgcagtgtttagaccaaaagtcttagatatgtaatcattgtaatgagaagcaatacaatacaaccgtcagaagtttcgattgttaatggttggaatgttgtttacctgaatccactgagaagtagtagtcttcaaaatactgcgggaacttgggttcctggtgattatttcaactaagaagagccacacatgacacaaagtatataattttcacattagttttaactagttatgatgctaccaataagagtgcagagagcttctggtaaatatgctatgaatgggataagtagtcatgactatgactcatgatatatatcacagaataagttacaagacttttacaaaacaaaaaaaataaataatttaaaatgatttttccgttgccgggaatcgaacccgggtctcctgggtgaaagccagatatcctaaccgctggacgacaacggattttctgtacgagtgggtgaacaaaatagtaaataatttttatgcatcacaagcttgtaatcttgagtaatgagactatgatagtgcagcagcatttgcatatatttaaggtttttaactcacccttagaatactggaatcgattatgccagtaacatataaaaagtatttggcacaattcatcatgtctatttatttttcttttccatcttttccttttattcttttttttttcttttatgaattgaattattgaaattctctcataaatataaaattttaatcagacatgtttttgtaatttacccaaaaataatatttttacttatagtactgatatgtcaatttattgttgatattgaatttaattaattaatgaaacagttaaacatttttgtagactaatataagtgtatatttaaattaagaaaaaatgttatcaaaagtaaatcaccttaataataaattgttaatgttatctatccaaaaatgttttaattgatcgatgataatatataataacagattgttgtttactagatactaggcttgttgtccataaggatatcctttaaataggatgtggattggcatagactgtcataagaaactaggtactagacttgttgtttactctcatatgcagatattaattaattacaagaatatccatgttcccctatgaggaatcctagaggcaccaaattccttctacttagccctaggagtgagtgaacaacgaaagacttatcaaggttgatccctcgaatagttttcttagccttctcaccacttgcatatgtcttaagaagacaccaaataccaacattatattcctccagcacaactttcattagaatgaaaagctttatacctcttgtacccttacaattccaacgaaggacattcattaagaaaaatggttattagagggttttaagcaataaaggaggacaaaataactgtattgaggccatgtgtgcctacccttgtgtctctagaataggaggtttccttacgccaaatgagttctcttgggatgatgaggtcgaagtaccctaatgaccctagttgcattgctttaatgaaagcccttgtctccgcattgggaaacaccacgtgagtgataagatttttatccaatttcatggtccccttttggctttcgcggagccattttgttgcatgcaagatgcctataccttgctcgtttttctttctcgtatacatggaagtctaggacacatatcaaaccaaagagtaaaacactaactaacaaaaataaaattattattaatttttataaaacaaaaaatatcacatattttaacaaaaaagtcgcatacattgataaaaagacttaacatataattttctcatttaaagaattttttttcttaatatttatcttaggtctcactccattatcctggttgtccattgaattggaatccacccatagaatacttgcttttgttttgatttcaatgcgcctccattttggtcgttacctttggaatcataaataaattttttaacacccaatttgttacctaggtaatccttttccacgagacatttggggatgttctcccctatgattgtttcaaactttaaccaccatatgtctattaattgtagaattattctggctatcacatttgcaatgaatacaaaattattatagctatcatttgcaattaacgtgacatcttggtactgattcaattttgaatcttgatctggtttccccttttcgatctgttttttttcaggagcttcacattaatgcctttcaaaactttaacattgatttttgtgccccttggcgtcttacacacatttttaccctttttaactaccatccatggaccgtataatcccgccttatcttgaacaaattgattagccacaatttgcgactcattaatttgtttagggcttacatgagcatgattttccttttctccaccttcatagctttcatggtagcttcctgctggtgattgtgttgggacatttaattgttgtttgttcaatccctaatgttgcttcactacattgtgagtccactttcatccctcaaactgttagaaaacaaaagttttttttttttattatatcttttttcttttcattggatcctagcttagatttgtgccaaggtttagacaaaaagaaaataatatatttatctgaatatcatttattagttatttgttgaaaaagtgtcttttgaataattgaacgccatattcatgtatttaatatatatttctctcttccaattcctataatcttctgatcatttggaaaattgaaagaaaaatagtatttaagtaatatttttaattactttcaatgaaggtagtataatatattttctaagaatggattggccgggttctttatgatcgtacttgccataattaaaatatattgagtgaagcccttcgtatttcaattttagaatctaacccaagacattgattcacgatatattctagctttcttcctaggtcaatttcaacatagattctgcaaaatctccctctggagtgtataaagttagcatatcgatttttaaaatggttcccagcttttggacctgcttaccataagaacttatcctcatataattcaatggaaagacctagaatgtagatataaacatcaatcttgtggtctgctaaatatgatataaccattagaggggtcacttgttttaaggaaacatatgtcatgtaatatataaatgggcatctcttataccctttttggttagtaattttgctgaccaaaaaaaaaatccatggtccttcaaatagggcatgccattaatcttctttaccgagaactaattaaactagttagtagtaagtcttgcgacatattgataatgcgtatagttcccattttagcccattccttgggtagcttgtgttcaatcataattaaaactatctttcttcccaagacatcaacaatatgagagttcttccgggggtcacaccattattcaaattcttcattcgagataggaattattattggacatagttatagctttgtagcatcattattattggcatactcctaattaccttgtaacatctaccctatgaatgttacgttccatatcatctacaaagctctggaagtttgccacaatctctttttcagcctctaacaaggtatccaaataggactttggaaccttatctttctacatattgtctttgtctctgccctcagtaataacctcatctatcgtaatcgaaccttccttagtcttaacctttttggtactacagttaaaagagtcttcctcttcttccttagaagtcttagcaggaaccctaacatagctcttcacctccctcagtcttatgccttatactttatagttgtatagatgttttcttggctttcttcttatttttaaatgttttatatagccacattcatggcctaattaagaaaaaaatcattctaaccattattagatcataaccgtaccactttgcagttgcttttcaactatataggtaaattttatttagtttcagaatatatagttttgtaatttattaatataaaagtatatgtgtaaaaatttgctggcatttgatccttcccttagatgttattgaatttgcccatgaccgatcttggtttactcgttttatctagggagaaattttcctaatatagtattaaaagactacgtagaactcagttttttatttatttatctggattgtttacaaagcactattgaattcgggcatgacaatggatgagaatcgagtttttgctatatagaatttatggactcctcaagagaatcaggtcacccgattttccgtcttttgttattattattattattattattattattattattattattattattattattattattttcatagtttgagcgtagacttactcctgcaactgcaagacgtggtcacttcctttttgaaagctttgttagtatataccttaactcttgtacaccttcagcttagttggagaataactctttcatgtgtaaaagcaattacttaagcataaatgctaaaattcaagggttgctttgaattaattcaataatattagtaataataagaatacacaattttttccattttacagtagaagtaatttctttcttgatttaaaaaaaaaaaaacttaaataattaagaattaattagccccggccaaatcaaataaaagaccgaaaaggaagcataaggaggttacttttctgcgcgtaggcatgcttgctacggtgctaccccatatgtggttcggaagttgatatataaattagtttattggcatggcaaatcaatttgagagatcgagtatatatctgtcaatatcttagtgattgtgacaaggaccatgaaatacctttatgtgttgatcatagaagtatatatgacttcattattaaaataattgatagattacaaaacaaacctaaccttgtttgatttaaagtccaagctggtgtatgcatgtttcaagctatattaatattgtattataagggatgatgttttcagaaatactataacaattttttttgactaaattcaaaagtatgtttgattaaattttaatattttttaaaatgtttaaattcaaaataatgaaaataaaatataataatagaaatataaagtataattagattcgaaaataaaaataaaaattttctgtacatatactcttatgatataaattttccatatcgtattataggaatataataaaaagattttattacttatctgaacataaataatatttaagaatacttaaaaaaaatataattaacatgtaaaatattacacaccaaaattcatatgcataagaataaatttttaaaccttaataaattcattccttgcagtaacaaactcaatacattatcaacatgattaaaataaaattacactctaattctttaagcaaatattttatattaaagtactgtggactaaaaaacaaaaacaaaattcactaaaaatatttagttagatttcatgataaaaaatgattattaacaaagtcagtaatacttcatagttatgatatgataaataaaaattcaaccgtcaacaacatcaataataataataataataataatctttcgtcgtactttctgcacatgtacttgatgaaaattaaatagcgtcactgaagcatgccacttggcagatatattaaatggtaaggaattaaatgccaattgcatgccgcaaggacttatttaggttaattaatctcatccaaccggtgaagagccttagagccctatatatattaatacatagtcttctgtaagagaaagcaatagcagggaagatcgatcgaaatggaagaaggtcgcaaagggtatgttccagtgctagtgggcaaagggggacacaacgtggagaagatttgggtatccatcaaagcgattcagcatccaaccattgttgagttgctggatcagtctgcagatgagttgggataccagcaaggactcctcagaatcatatatgatcttcacaacttcaaagccattcttcacaaggcttccaagaattgtatctagcaaattacatccatgatgtcttgtttttcattttctgttaattacgacccattctcaaacatgttaatagaaaataaataatcaattcttacttgctcgctgtgcattcaactttttcttctttttctttctttctttatagtggaaaactaaacacaacttttccccccctcattttctccgaattattttttcttgctaataacatctacttagaaatctgactatttttaatgaatttttttctcctaattatattttttttccactcaaagacttaaacataaaattttactcaaaagatccaaatctaattctactcgaatcataataatgttagaaatattatgtttatttgaaggtatacaatatattttttaattaattgataatgtaaaaacttatctaccaatttttctagatatatttatatataggtaaactatatttgagaactagtaataaagtatttaatgttataatatgaagagggattaagttaatgtaggtaattttaaaagagatattcttcatttgtgtcttttcttttcttttaatgaaagggttctaacaagtaatnnnnnnnnnntatatatattaaatatgatagataattaattaaatttaactttattcaatacaaaatatttattagatttaaaaaatacaatatatatttattaaatgtatgacttttcttataatttatataagtcttgttaactattgtcgttggagtattggttaagaaaataaaataaaagagagcaaaaatgatcatggacaacacaatttttcatctctcaataaaaatattttcactttaaattttttaactgatatactaagataattggttaacatcagtatttgtcaatctatacatattaaaaagtattgttaaataaaaagtgaacggttttttatacatttattgttgcatttaataaatacaatgaatctacatattattttattacagtaattaatatatgttaataaatataagacatttaatgagattcaaacgtacatccaattgcatatgttttagaaacagtacattaacaacttatatcctaggtgtatttaagttgtaatttgctaaagtgttccttctcacatgaaataggtgcatttcaaggatttgttgacataaacccatttgttttgttggagtactctagcaaagttcatattgggtgtattttaaggtgatcataattataacttgttaatgttttcatttaaaattaaaaaaaaaatagtaagggtatggttggtacgtaaatttctatgcataaatttatttgatttattaaaacgtatggtttggataatataaatataaaagtttcttgtttcattttaaaaatagataatgagatatataatacaatcaagtaaaaatgaataggaaaaaactatcattttttgttgataaaccatgagacaatgttttgtttcaagtataaatacttaaaagataaaaaaaatactcatttgacttctcatttaataattatattttttatttcttatccctcaggattatcaatgtcgtcagcatggtcgttactattatcacatttttttattattgccaccaaatcatcacactcattggcaccaatattattattattgtcttcctttttattatcattatcatctctattgtttacaccacctccatggttgtgcacttgttttgattattctcattgtgattgtttttattaccatcattattattattattattactttcattatcacctttttgttgctaccaccctcaccataactgtgtcatattaatataattaatatgaaatatattgaaacaattaatattagtaaaggaattatgataatatgcttgttaaaataaaaaaaatgtattaatacctacatagtacagatattaacagagtacttaatattgttagtatagtatttttataaatatataaataatattattttcatgtataatactaaatatttatttaattataatacttaaannnnnnnnnnnnnnnnnnnnnnnnnnnnnnnnnnnnnnnnnnnnnnnnnnnnnnnnnnnnnnnnnnnnnnnnnnnnnnnnnnnnnnnnnnnnnnnnnnnnnnnnnnnnnnnnnnnnnnnnnnnnnnnnnnnnnnnnnnnnnnnnnnnnnnnnnnnnnnnnnnnnnnnnnnnnnnnnnnnnnnnnnnnnnnnnnnnnnnnnnnnnnnnnnnnnnnnnnnnnnnnnnnnnnnnnnnnnnnnnnnnnnnnnnnnnnnnnnnnnnnnnnnnnnnnnnnnnnnnnnnnnnnnnnnnnnnnnnnnnnnnnnnnnnnnnnnnnnnnnnnnnnnnnnnnnnnnnnnnnnnnnnnnnnnnnnnnnnnnnnnnnnnnnnnnnnnnnnnnnnnnnnnnnnnnnnnnnnnnnnnnnnnnnnnnnnnnnnnnnnnnnnnnnnnnnnnnnnnnnnnnnnnnnnnnnnnnnnnnnnnnnnnnnnnnnnnnnnnnnnnnnnnnnnnnnnnnnnnnnnnnnnnnnnnnnnnnnnnnnnnnnnnnnnnnnnnnnnnnnnnnnnnnnnnnnnnnnnnnnnnnnnnnnnnnnnnnnnnnnnnnnnnnnnnnnnnnnnnnnnnnnnnnnnnnnnnnnnnnnnnnnnnnnnnnnnnnnnnnnnnnnnnnnnnnnnnnnnnnnnnnnnnnnnnnnnnnnnnnnnnnnnnnnnnnnnnnnnnnnnnnnnnnnnnnnnnnnnnnnnnnnnnnnnnnnnnnnnnnnnnnnnnnnnnnnnnnnnnnnnnnnnnnnnnnnnnnnnncaatacttatatatcagaattttgtagcttataattatttctcaacagatttttttcccttagctattttcatacttttttactgtgtaaaatttgatttgttgttgacttctaacaaaattaattatcttaaaatcaattttatgattatgattataatctattatatatataattgattattaaaataatttaattttttagctatcccaaacacaccctagctattctatttaattaaattaattatataattaattttaataataataatattattattattattattattattattattattattatgaatatagtatattaattgcattaaatttttataatatatgtttattaaacatatggattttcatattagtcaatgtattattaaatacaaattaattattatagaatttaatacttatatataatgaaatatactttaaaaaattattgttgttatataatttttaaaaaatatactttataaaacatattttgaaataaatataatttaatgaaattataatttattattgttgttagaggtgttgttcccaactaattgggcaagttaatgtgggtggacaacgggtgaagctgctgtatttagcttgcaatggcttgagagaagaatatcatttgttgagaaacattattaattactacgaaaacaacattcttaattaatacagtctgttaacatctagtttttcaatatcaaaacatcgccattttttatttcttgccttcaggaatgttctgatagccgggaagcgttttgagcaaagaatatcataagattttagttgtgcacgttccatatgatattgttcatttaggtaaaatgtttattatattttcaattcccgttatttttaaatttcagttttattatttttttcttaatgaaatgcattactaaaacgggaaccaaaagctaatatatattattgttagatgtggattgtattagttttccttagccatatctaccagtaatgtattgctaacaataaaagtaggagctacaaaaaataaatacaaaacagacaattactgtttagtccagccttagctaccatttgtaactttttaaaaaaaaaatcatttgtaacttgattagcctcttgtaacacatgtagccaaataatccgaccaatatgatgatacattatgaatggcttgcaccaaattaacccgtcatatatatatatatatatatatatatatcatttttgtttcaaagtttcaattaattaaaattaggattctcattagttatttctagacatcgcgtgtattcatttgtcttcaaaaagtcaatatcaaaactcacttgtagaatccaaaatagaggatttggttctaaatcttaattagatattcatttagaataaaaaaaggaaacatctgatcagttaacatatcccaaataaaattcatcactgaccaatatttgattcaaattcgttatctataacttagggcattttaattatttaatatagatatgtcatagatattcctttttaatgtggcatggctattaaaaattttgagcagcacattaatcaccgagagaaggtgacacagaagggagaaaagtccattggttaagttagggaggaaaactgaccaaacagaagaagattgagggccttggtttttgatatgttagagcctagaatcactaggtcgtcggcttagtggtggagggcttggacctttgaaataatatgtctgagttcatagatttaaacatcagtacgatcattgtaaaaaaaagaagatatgttagaactttcaacatgctcatcaatatcataatggagcagggagttgccacgaggaaacttgacatggtttttgaaccgaagcttgctgcagaattttgtttgatcaccaatgtgatttttgaatctgattgctttcagcttgtgaatagcaggaatggtccaaatacaaattaaataacaaaagttattttgcaggaattgttgcagattgcaagtatcttagtaatagtgccttgatatataaataaaaaataaaaaataatagtgccttagtttttacaaaaagaaggggaataaagtggcacatgaattagccaaattggctttcaattgggagatataaatattcccaatatcactgttgtttctgctccagaaagaaggccatactgatcagtttatcaatttgatgctcaaccgtaccggtagtcctatccatatgggatcttttatatatatcaattgatttaataaaggaaaaaaaaaaaagcacaatgatcatacactcatatttgttaaaacaaaactacgccttctgtgtggactctgtcaacatttctatcaagtttatactcttgcaagaaagagagaaaaaactaagagaaatgagtataaaatattacgcaaccgtacgtgcatattgatatagctacatgtgtttgtgaccggatccctccagacacacacatctatatatactcttatatatatgtaatatgcttctgaaaccctagatttggaagtaatttgtggctagaaaaatgttattaattaaaaatcagtaaataaaaatctttatatttaactgaaatttttagtgtataatttttaacaaatcagtaaataaaaatattttttaatattaaaattaactaataaaatattaattaaaagtataatatttaactgaatttaaaagtatattatttaaatattaatataaaatataagaaatacgcaattttatatttacattttattataggtgttaatttgtttagagatgggataagttgggtatgataccatttttttgcgaataattatccaaaccaaaacccggcccttattaattacataaataaaaatcctattattattattattgaacataatgaaaataatatctttttttacagaattaaaataatatcttattatttaataaaattgatttccatcaaaannnnnnnnnnnnnnnnnnnnnnnnnnnnnnnnnnnnnnnnnnnnnnnnnnnnnnnnnnnnnnnnnnnnnnnnnnnnnnnnnnnnnnnnnnnnnnnnnnnnnnnnnnnnnnnnnnnnnnnnnnnnnnnnnnnnnnnnnnnnnnnnnnnnnnnnnnnnnnnnnnnnnnnnnnnnnnnnnnnnnnnnnnnnnnnnnnnnnnnnnnnnnnnnnnnnnnnnnnnnnnnnnnnnnnnnnnnnnnnnnnnnnnnnnnnnnnnnnnnnnnnnnnnnnnnnnnnnnnnnnnnnnnnnnnnnnnnnnnnnnnnnnnnnnnnnnnnnnnnnnnnnnnnnnnnnnnnnnnnnnnnnnnnnnnnnnnnnnnnnnnnnnnnnnnnnnnnnnnnnnnnnnnnnnnnnnnnnnnnnnnnnnnnnnnnnnnnnnnnnnnnnnnnnnnnnnnnnnnnnnnnnnnnnnnnnnnnnnnnnnnnnnnnnnnnnnnnnnnnnnnnnnnnnnnnnnnnnnnnnnnnnnnnnnnnnnnnnnnnnnnnnnnnnnnnnnnnnnnnnnnnnnnnnnnnnnnnnnnnnnnnnnnnnnnnnnnnnnnnnnnnnnnnnnnnnnnnnnnnnnnnnnnnnnnnnnnnnnnnnnnnnnnnnnnnnnnnnnnnnnnnnnnnnnnnnnnnnnnnnnnnnnnnnnnnnnnnnnnnnnnnnnnnnnnnnnnnnnnnnnnnnnnnnnnnnnnnnnnnnnnnnnnnnnnnnnnnnnnnnnnnnnnnnnnnnnnnnnnnnnnnnnnnnnnnnnnnnnnnnnnnnnnnnnnnnnnnnnnnnnnnnnnnnnnnnnnnnnnnnnnnnnnnnnnnnnnnnnnnnnnnnnnnnnnnnnnnnnnnnnnnnnnnnnnnnnnnnnnnnnnnnnnnnnnnnnnnnnnnnnnnnnnnnnnnnnnnnnnnnnnnnnnnnnnnnnnnnnnnnnnnnnnnnnnnnnnnnnnnnnnnnnnnnnnnnnnnnnnnnnnnnnnnnnnnnnnnnnnnnnnnnnnnnnnnnnnnnnnnnnnnnnnnnnnnnnnnnnnnnnnnnnnnnnnnnnnnnnnnnnnnnnnnnnnnnnnnnnnnnnnnnnnnnnnnnnnnnnnnnnnnnnnnnnnnnnnnnnnnnnnnnnnnnnnnnnnnnnnnnnnnnnnnnnnnnnnnnnnnnnnnnnnnnnnnnnnnnnnnnnnnnnnnnnnnnnnnnnnnnnnnnnnnnnnnnnnnnnnnnnnnnnnnnnnnnnnnnnnnnnnnnnnnnnnnnnnnnnnnnnnnnnnnnnnnnnnnnnnnnnnnnnnnnnnnnnnnnnnnnnnnnnnnnnnnnnnnnnnnnnnnnnnnnnnnnnnnnnnnnnnnnnnnnnnnnnnnnnnnnnnnnnnnnnnnnnnnnnnnnnnnnnnnnnnnnnnnnnnnnnnnnnnnnnnnnnnnnnnnnnnnnnnnnnnnnnnnnnnnnnnnnnnnnnnnnnnnnnnnnnnnnnnnnnnnnnnnnnnnnnnnnnnnnnnnnnnnnnnnnnnnnnnnnnnnnnnnnnnnnnnnnnnnnnnnnnnnnnnnnnnnnnnnnnnnnnnnnnnnnnnnnnnnnnnnnnnnnnnnnnnnnnnnnnnnnnnnnnnnnnnnnnnnnnnnnnnnnnnnnnnnnnnnnnnnnnnnnnnnnnnnnnnnnnnnnnnnnnnnnnnnnnnnnnnnnnnnnnnnnnnnnnnnnnaaaattatcctcacatatgaaaaactttgttggtttggaaaagttttttacaattacgctaaatcacaactcaacctctccccttcgtgtgatatttgtctttataattataattagtttacaattgttctgttctattttattatttaagaaaatttgtttccattacaagaaaaatatgtattaacaagttaaataataacaattcatatataaatattacatatgagtattaatatgttaatttaaaaaatattttaagataaaaaataatcaaaaaggcatttgaaaaagggttcaaactgattttctttattttttataatagataatgtgaccatttaattttaaaatgtacttcaaactgttagtataattttttttaagagtttgtctatcattagtgttatgactatcagatttaatgcattatctttaattctctttcatatcatgtattttcttcatatgcataaaattaaaactttataattattaattaaaataaataattaaaattataataaagtacatgaatatatgtaataaaattataaaatcttaataattagtattttaattatttataaagaaaactatattctttattcactctaggtaaatagnnnnnnnnnnnnnnnnnnnnnnnnnnnnnnnnnnnnnnnnnnnnnnnnnnnnnnnnnnnnnnnnnnnnnnnnnnnnnnnnnnnnnnnnnnnnnnnnnnnnnnnnnnnnnnnnnnnnnnnnnnnnnnnnnnnnnnnnnnnnnnnnnnnnnnnnnnnnnnnnnnnnnnnnnnnnnnnnnnnnnnnnnnnnnnnnnnnnnnnnnnnnnnnnnnnnnnnnnnnnnnnnnnnnnnnnnnnnnnnnnnnnnnnnnnnnnnnnnnnnnnnnnnnnnnnnnnnnnnnnnnnnnnnnnnnnnnnnnnnnnnnnnnnnnnnnnnnnnnnnnnnnnnnnnnnnnnnnnnnnnnnnnnnnnnnnnnnnnnnnnnnnnnnnnnnnnnnnnnnnnnnnnnnnnnnnnnnnnnnnnnnnnnnnnnnnnnnnnnnnnnnnnnnnnnnnnnnnnnnnnnnnnnnnnnnnnnnnnnnnnnnnnnnnnnnnnnnnnnnnnnnnnnnnnnnnnnnnnnnnnnnnnnnnnnnnnnnnnnnnnnnnnnnnnnnnnnnnnnnnnnnnnnnnnnnnnnnnnnnnnnnnnnnnnnnnnnnnnnnnnnnnnnnnnnnnnnnnnnnnnnnnnnnnnnnnnnnnnnnnnnnnnnnnnnnnnnnnnnnnnnnnnnnnnnnnnnnnnnnnnnnnnnnnnnnnnnnnnnnnnnnnnnnnnnnnnnnnnnnnnnnnnnnnnnnnnnnnnnnnnnnnnnnnnnnnnnnnnnnnnnnnnnnnnnnnnnnnnnnnnnnnnnnnnnnnnnnnnnnnnnnnnnnnnnnnnnnnnnnnnnnnnnnnnnnnnnnnnnnnnnnnnnnnnnnnnnnnnnnnnnnnnnnnnnnnnnnnnnnnnnnnnnnnnnnnnnnnnnnnnnnnnnnnnnnnnnnnnnnnnnnnnnnnnnnnnnnnnnnnnnnnnnnnnnnnnnnnnnnnnnnnnnnnnnnnnnnnnnnnnnnnnnnnnnnnnnnnnnnnnnnnnnnnnnnnnnnnnnnnnnnnnnnnnnnnnnnnnnnnnnnnnnnnnnnnnnnnnntttttatatatataaaaaaagcataactttttatattagaataggcgaaaatgcaatacaactttacacatcatgtaaatgttctttactatatatgtgtctggttttgatttatggaagcatttctcctaaaccgaataccggtagaagagcagaaaggagataaaggaaaccacacaagtcacgaggtgggatatattactggaaaatgacaatcatatctaatagcatacgttgcaccaaactaagatgcccaaagaaatacacgtaacatcatattctagtaaatggggcaatcaaactcccaccatggcatagcaattagctagacgacaaccacacactctctaaatatgtacctacatttagatattgttggccaaatattattatcataggcatatcctttgctttggttttgccttctccatccatggcaatgaaaatcgtgaaccacgaaacctttcatacctgcctcttgtcacttcctgtgactgattaatgccgtattctagtagataagtacatttacacatttagaaccttctcatcttatttggtatgttcagtccccttttcaatttgcatcagcatttgattccgcaatattaggtaaatgtaattttcatgtcatggccacttttaccgcctgcttatcattgttgggtgtatatatatgtgtaacatatatacatcctttcaaaatatgtaagataataaccttctcactttgtaaaccagttaattgcctcattttcctctgcttcattccccactcttccatatatatattatggccttatatgacaacaatgatatgaacttagaagagatagatttggaggcctttgaaattgatgcggccatcctaagagaattgctagaagaagatcaagagggcaaggatgataataaggatcatggtaaagtagaatgcatagtagaatccgtagaagaaaacaatgctcatcctgacatgatggttagggagcaagaacagcagcagcagcagaactgtttggagaagtatgggtgccatgactttgagtggctcaatatgatggagccaactaatccactgaatgatgtaagaatgaattggttttcagatgacattgttgagatggtggattttggttatgctaatgaagaatgttactctcaaatttgtgatgggctagtctctaatgaggcaagttatggtttcctgtgggaagattatgatatttaggtgcatattaaagtttacctttagctagctctagaagagaagaggggaaaaggggctaaaatagctcatgtgtgaaagaatctggttagtaattcgtaaattgaagaccaagttagcagaactacatgtgtaaatgctgtttgggtcaaattctattaagacataagtgaaagaaaaagacttataataattagtttaaagagtcgatttccaaattacttgatgcatgtctacgttaattaattatccatttatctttccttattttttccatctctttcattctatattctgcatgatagctgagaattaagatgaatgcttactaagtaatagtaaaatagagggaccttgctttgatgcctcattcaggacaatatctacatattaggacctatttggctatgtagaattgataatgtgataactatatgaatcaggattattcagtggttcaaagggatgagtcaacctctagtatcaggaagtttagaacaaactcatgcatagtcaatcaattggattaaatctctgagtggattaaacctctgaattgattactcaattacatcattgtaaggtcataaatgccttgtgattttttttaatggttttgaatttttaaatcttattatccttaccctttaaatttttgtagtaacgtttggttgacattatttgagaaggattgaggtgagttatcagagaagttattagactcacgataaatgtgaagaagttattaacaaagtatttgatgaacataaaaaatattgacaagttgataattactaaggcacttttcccatatttaaaaagtttgaagcacaaagaaagattatatctaacattgaaaaacagtaataaggcttgggaattgccgaaatatatatgtacgctctgtatcttaattatgtatgactcgagtgttccatctaatcacattagttatctattacacacgtaaagttacgctcaatgagtttcaaatatgagttacaatagtttaaacttaaaataaataattttaaaataattactttaaaaaaaagttattcaataagcacataagattttcttttcaaaaaataaacaaaaaaactatttttttaaacagaaaagatttaaataaacatacgaaaaaaaaaactacttatttgattaaaaataagtatttttaacaaataaatttaaacaaattaactcaataagtttacaatacatgggtacatgcacagatgcaaaatgggagctacagtacataacatcatgaatagttgtcaacttattcgccgtccatcttgattgttgaaattttcttaattcattttccaaatggacatatgtgaagctctcagactgtttccagaggccaatcataaaaaaaaattgatggcttccttcagtggcaattatgaagtaaacatatatccacgccaacacctcatgaacagttgtcaggtatctttagaccccgcgagaaatttggcaataaaaaatccaattgtatcaagcggagatgatggatcaaacctctgaacaaggtcttcctcccctggtcgtaaccactccctgcatagacatcatggtgtgaaaccaaaaattggcactgaatttttttatttattattttggataaaaagaaataaaaggtatatccacaaacaatactaaacagcatcacagatgagtgtgtatacaagatcgtctatgtaagggagagataaaaatgcacaatcatggacaaatggatgaagggcttactctatatatccatcaggaaattcacagctaccaactatacccggtcctccaattcttgggtgctggaataaatcaaatagcaaatccgaataactcaaccaagtgaactaataattcattacagacaaactaaacatcaaaatttgtttgtagtcaccacttacgcatcttatttataaattgtaagagggatcatccgtcaattaattacatatataatcaagatagtaattcagcccgagaattatagaagcctaatcaattcaaaagaataaaaataggaaattcggactgcaaagaattagcatcaaacgtgtggtgccaacgacagatatttgtatttatccgaagcatatcgaactaatgcttcattctcaccaggattaatcgtacaactgttataatacaatagccatcaacaaatcagtttaaaagaaacgtctcaaataaaaaggggtaaaaataaaacttcagaagtgcccatccaaagataacataatggtttgaggcagcatagctacaaaacaaacttattgataattgaaaacaaaaaatctcttaaatctttcttgtattaagctgtttggctggaagcaaattccaaagaagcaacttagacactaaataaaatatatttcagaccattacaaatacatttcaaaattactaatgtcatgtttagtttaggtaagaaagtgaaaggaaagaaaggggaagggaagaaaaagaatggaaagtgagatgatttttaaggttgttaggtttgagagaaagtgaaagaaaagaaacatgattgtaatagaaaacttgtgagcatgcacagaacgatgtgatcaacaaaaatgcatacttacgtggaatagacaattactcctccaggtcgaactaattgaacagcctggtcaaacatccttctctgatattttgcatggtttcttaaagattgagttgtttcctgccaaaaacaaatggcattgcatggttattcctctttttttttaaaacaacttttttgtgggttaaatttttttttatataaaaatgaacaataaaaactaacttaaccacccagacagggatgatgactatgcatcacattgaccgatatataattcatgctgacaatttcacaaattacactttctgggcaaaaaaaggtgaatttaccatagaataaatttttttccccaatcacattgaaataaccatcacttctacacattcctgtatttcaggcaaaggttaagatgtacacttatctgtgcaggatttagtagaaaaaactaatggtggtataaatcaagaaaagaaaaatgagaacacaattccactttaagataagccagtagtccccgtatcctctctatatttgcaccaataaatctagattggtctaagcatgtgtgtgtaaattcaagtaaatgcaggataaatttcaatacgcagatccacttctacctctccagcaaacaatcgaggccttaaaccaagggcagaacagggagcatcaagaagaactctgtcaaaactgtcaggagaaaaaccttttgaacgatcaaccctaccacccacacactgatttcttccaggtccatttcgtgctcttcgcatgttcttccggatgtcagctttgctaacataagctcctccatttgtttttttgcctttacctttaaaaattatttaaaaatgcatttgtaaattgttgatacagaaatgcttattgtgtatataacaaaatataaaacaggaaagtgacaaaccatagcacagaagaaatgagccaacagaaatccaataaatctaatcaagcataatatttgaaatcgttattcactttccagaccatttttaacactaaatgatactatgatgatgaggctcatgcaacagagacaaacaatgattcacagttctttcttttcagctgatgtttttctctttcatcttgaaaatataagaataagtttcttcgatctttgcatttagcaaacactactttcaacataaaacagaatgttagacaataagagtgattcggttagtgtgattcgatgtataattccaatgcacttgatagtacagctttagcattgaataaaaatataaatttaatgtaatgctttatatcatgtgtaatgaacaagtcagcaagtagcaaatgaagacatataacgttcctctagagtctgagagtttaaaccttctgtaacaaggggtgacactctttctacttgcaaatttggtgcaaacacttgatttgtcacatcaattttggaattattacagcacagatcagtaaaagtatcaatatcatctcttcgacaaacagatttaagagcatctaatttaaatgtctttatacaactcaagcccatttcagctgccaatttctgaatatccagcacctagacagtcatcaaaagttgatatgttaacaaaccattaatttattacaactctgcacgccatttaccattaatttatcatatttatcataatcattacaaaataaccaatattcagtgtatcaaaaatagggtacagaaatctggccaccaatgaaacttagaaataaatcagaaaatagaacaatatgttaatgcatgttaagctatgattccacaacatccagttactgcagtatacttgagttcaaacaagcatataggaatggcaagtttttgctaagttcagcatattcaccttattatgagatctatctgttgcaatgatctctccttcatccttcataagtattgcaattgcagttgttttccctccaggtgcagcacacatatatagtatccgctcacccttttgtggatctgagtataaaaaaagaatctatataaagaaaaaaaaaattacaaagagatgagaggataaggaatcctcaatccttcttaaaataagaacaatagtaaaacagcaatgaaaagagaaaaaccaatagagcaaagtaaacaattattgtcattcagctttatcaatcacatgccagaaaatctaaattagtcagtagcggatgagaccatagcaagacctatccctgactaaaagggcatattttgaggcccacatgcttgccagaaaagcattatactatgacggttcaaatccaacttctctcagttgtgttttaatctggagtgcttgcagaagaatatagtaaaatattatttactaccaaggaaaacaaatggccaacaataacattgcatgtaaatcactccaaagtcagaaaataagaaatgagactctaatttatgtaccgaaagcatgagcagcaataatacttggcaggttttgaagaaatatttctccctcaagcacatctggaaaacagaaaaagaaacaataacacatcagctatacacatgcttcaaaactaaaaataattcacaaaatttccaaatagataaagagagcaaagataaatggcactcaggggattaacccaggagtgctagactatacagagtgggggcctctacagagggaaaaaagcattaaatagatgaagaacaaaacaacaaataaaagactgcacaggcagaccagaaaaggaccatatagaattacataagaaaactctggaaaacaaaatatccacagcaaccagattctatctcacctataatcacaaatctgtaggcttcatacaagctacacaagtctctaccccctccacttaccaagtgagagaccatgtcaaatctaatttcttaaagataatctcctcagatatgtataacagctgccaattcttatatatgttttgagcaatggaaaaagtatccaaccataaacacttgctaaaactcctaaagaatcaattattaaaacaatatctaatgttcttcactaacattccaaacagcaaaagataaaggcaaaagttcagtatacgattccaaaagcagagaaacaggtttcaacactccttgatcaactcgatactaaagcaacaatcattatcaacaccaactaatgagattatagtaatcttaaactaataatgtgttgaaattcagtagatcagagtaaagatgtcttccttgcacaaatttattcggaaaaaaaaaataactttgtcatgctgcattatatcacaccataaaatttcattcctagatgtgtagagtaattataaattcgtctcaaaagataaaaatatcgctaatgaaagagcatggcacattagagacaaatttatcaacactctacatatttaggaacgaaaataactacttatccaaaatataatttaatcttatctttcctcattttttaatcgttgcaagcgtaatagtacaataaacacttaaaaaaataaacataagttagaataaacataataataaacataatctgtatgttgttctgaaatttctatcgtgacaannnnnnnnnnnnnnnnnnnnnnnnnnnnnnnnnnnnnnnnnnnnnnnnnnnnnnnnnnnnnnnnnnnnnnnnnnnnnnnnnnnnnnnnnnnnnnnnnnnnnnnnnnnnnnnnnnnnnnnnnnnnnnnnnnnnnnnnnnnnnnnnnnnnnnnnnnnnnnnnnnnnnnnnnnnnnnnnnnnnnnnnnnnnnnnnnnnnnnnnnnnnnnnnnnnnnnnnnnnnnnnnnnnnnnnnnnnnnnnnnnnnnnnnnnnnnnnnnnnnnnnnnnnnnnnnnnnnnnnnnnnnnnnnnnnnnnnnnnnnnnnnnnnnnnnnnnnnnnnnnnnnnnnnnnnnnnnnnnnnnnnnnnnnnnnnnnnnnnnnnnnnnnnnnnnnnnnnnnnnnnnnnnnnnnnnnnnnnnnnnnnnnnnnnnnnnnnnnaaatgattaaaaaaatatcatgttttgaagggactaaaagattatttaagctgcagaaatagatttcgttcaggaaaacatactgataccaatatattaatggaactaggcttatattttaatcagatttcaagtccaagttctgtggattaaaaaaatatagttgataaaaaagatccaagtataggtggtcaattaaattcttaataaagattagttgtttttaaagttaataaatatatcatactaattaaatagtgacaaaaaataaagcataaaaatattaagtttacaatatgaataaaatatcaatctaacatattatacctccaactcaatgcttccaatttttttgtgttaattatcctgttcatcaagagaaagattttgactaattcgaaatttaaccaaaagataaataaaatttggttaataattatttttgtcaagattaaatttagataatatctaaataattcaatcttaatttaaggatatttatcacttatgtctaatcattattgatttctgtggtagaattgacatgctttttaaaaaattggctccaatcttgcaaaatttccaccttattctccgctgattttgctgaccaaactatgtacagggacgagttcttaaccttgccatatttggatttttttttttcttgaaatagtagtgactgctgcagctttgagtgccacttacattctaataactgaagttgatgttcaagatgtcaattctctgggtcatgtgctgtatacgagaacgagagagttaactgaaactatagtctctagttgggcaattcaatttaatgatggaaagaaatggaaatcaaacaagtattgatcgtatttataggataaaaatgaaataaatttagtttgttgactaattttaactgccgtaactttaggacataaagagttgattgaatagatagaggtaaatttaagttgtgataaattacaattttttatacaataaaaaaaaatcttcgaacaaggtcagaagggtgataaatattaattgcgttatcatgtgttcttctgttccagttaagctgatgtaatattttgataaattttccatttatgaataaaactagaaaacgacttcaaaacaacggttaatagcggactcattcaaatacgtgataagaataagatagagtagaagaaagacagacattgatcgtgttgtctccacatagatagatagaatggcaattttcatagtccaagcaaatacaatatgctttgacaaatgagatcaggtgatattcattactcatgttgtgggtgtttgattctatgaatattttctattaattcatttgtagatgtcatctcatcttttagagaaattatattaatgtgtttttaaaaattaactaataaagaacttatttttgtttatgaaaaagttcatctcattttttttataagtgtttctaaataaacttaccaaaacatctataataatagttactaattagattaatctctaggtatgttggtagtatttttttatagaaaagattttattaagaaaatactatatagtatagcctgtaccattaatacaacactacaattagtacaagaaatctacaacaataataaatcaacataaagtagaaagtaattgggttgggtgtggacgtcgaataagacgtggttttggctaaaggttccacaaaccactattagtgcaagtcacaagtgaaaaactagagaagacaatagtcgtacagttagatttcttttatttaattcttcacggaaagtgtcactacccactagtgaaatgattttcgtgtatatttttctttcattttaagctttgtgacactcaaacccacacgagtcatgttatagtgcacatctatctgatcgatatatgaaaaaacttggaagttacacagcataaacatatttttttttctgtattcggagtgaggaagtatcacgtggaagaaagattacaacatggtacagtaaaatccaagaattaataaatggaagagtctatcacttttcaaagtactagtaacctcttcctaccccggcccggataaggaaaaaagacactaatttgatgttgattcttggcacgtatgtttgcatcgaatttcaacaactatgctaatttttctatgatctcaatgatccttcacacttatttgcctagtgattgagatttctggggtattaacaatcagttccaggaacccattttgcacgttatgacaccaaaagcacgtattcacatgctccaacgagaaaactgcctcattgcatgtgcagccacacgcatagcaatattttttctatttttatcaatcctataattttcagacaattaaaattaggcacacgccatatattccatttactctcttttcttttacatcacattaattattgcatccgtaattttctcttttcagatcatttcactaagataatgatatgttagtaatagtagatacaacttgtataaattttttttttgaagaatatatttttcaagttgtgataataaagattttaataatttaatgttacacgatttgataacgatataaaaagttaatagtatgttgaaattaaattatttttttacgtatctttcaaatgatctttttaagagaaacttattgttactagaaaatgttttatttaaataactttgaatcccttaaaaattgtaatttttattatatatctcttacttaaattttttcctacatatacctgtataaaatatattttttgtctacaataaattttccatttattgttttctcttgaaccttttaaatatcaagattttttaaattttgttattttaaataattaaataaaataatgatatttaaaagcaataaatgatatacttgtaatatttaaaagaatcaaacaaaaaaactatatacctaatagaaaaaaccaacaaaaaataataataaaggaatcgtttactaaaaatacgtttttattaagaaatcgttttaaaaaattaccatgaggaactaagcaagaaaattacacatttttggggccctccctttggcctctactaggcacagtattagctacactttttaaaatacaaattcaaacccgataaaaaggggtcgataatgatctcattctcctgaatcactattatttactttgtcaacaaattctttagcattagttttcattatttaagtcacaaaggtggacttgtctttctccatgctccgttcaattacatgacgactggttcaaaactctgacagcggctagagagttttaccgctccaattttgtttttttggatcatgatttatcaaacaccatgtctttgacttttgctagttgcagccttgcgaggcaaaagttatatctgtgacacaatcacaagccaaggaagcaggaaccagagaggaaaatcctgtgataacaataccagaccaaacatcatttattatttagacttaaatatgatttatctctacgataattattttgaatttctgataattttttgtattaaatttaagatagtaattatatatcaaaaattttattttaaatcactgcgtgacacaatctcaacagataatatatcaaaaagatttgtcatacaaaatgtaatgtctcatatatattgaattttaaaaattgtttctaaaattagtataaaaagacgcaaagcaacaaattttggtgttaagattgatgcacaccagatacatcctaggtcaaataagtgtgtgtttgaatagaagattgcaaacctagatttgtagaagtatcatcactcttatttttacttttaacttacttttatcaatctagaagtatcatcactcttatttttacttttaacttacttttatccattaaatttacatagagtccacacatcatattttcaacttaaatccaaacacactaaaaaactcggaatgtaatcctaagtctcttcttgtgaagtactgtatgtaatcctaactcgaaggtgtaaatagtttgaaataatgctgcccgtgatgagaaattcacttcaaataagtactatatgttttctttatttttaaaaatggttttccaaaataaaaattctacacaatctcttttattagaaactttataattcattttaagggctgataaaatatgataaataataattagtgctttaataacattggttaaagaatttaaaatcaaaataggggcaaatacccatataatttcatatatctctttaaaatattccaattttaaaaaaaattggatagacaaaaaattatattatccataaattttcttataattttttatgatttatataataaatatttttaattttaatttcttaatcaacgagagaaactcagaatgctgatcaccgaaacccataaaatactaaggctttattgtgaataaaaccgcgttcttgggatcaacctttgacattaggcttccaagtctttctcattcgttgttactaataaagtcacaccaccttgcttttcaatccttctttcttccttctctccgtcaaaaacaattcccatctgccaaaaccaatgttttggcctcaaaactcataagttcacattttttttcttcatttccatttactttgccaatccctcatcttcattcattttcctcttgttttaatattttgcttctgattgattacctttgagataaacttgtgaactcagttctttctttgaccctcttggctaagctcagaaatttccataaagaaatagattttctccctgaaattctgttaggtgcttgatattggattttcattgggtccaagaaagaagatatcatcgttactatggttttgaacgtgtctctcattgtggttctgcttgtgatatgctcctgtgttgtggaagccatttctaggaatcacaataatcacaatcacaacaatatcaacaaaaatggatcttctctggctgccataaagtttcctgatcatccaagtttcaatgatgtctcttcttctggggacaatgattgtagcttctcaaattctgagcaacttgggcattctgtacctaccaggacatcaggtgaagaaactgatgaagagagtgaggcttttccagcaccaaaaccacacgagaattcggtgaaactccacttgaaacacagatcagggagcaaaggtgctgagcctaaaaagtctgttattgattccacagtaagagatttcaccagaattcagaaccttcacagaagggtcatagaaaagaagaaccaaaacaccatttcaaggctgcagaggttacagaaggagcaaccaaagcagtccttcaagccagtggttgctccggccgcttcaccaacaagtccagtttccgggcagcttgtggcaaccttggaatcaggggtgagtcttggctctggtgagtacttcatggatgtgtttgtggggacaccccctaagcatttttctctgatacttgacactggtagtgaccttaattggattcaatgtgttccttgcattgcatgttttgagcaaagtgggccatattatgaccccaaagattctagttcttttaggaatataagctgtcatgatccccggtgccaattggtttcatccccggatccacctaatccttgcaaggctgagaatcagagttgtccctacttttattggtatggggatggttccaatacaactggggattttgcattggagactttcactgttaatctcaccactcttaatgggaagtcagagttgaagcatgtggagaatgtgatgtttggatgtggtcattggaatagaggcctgtttcatggtgcttctggtttgctaggattggggaaaggatcgttgtcatttgcttctcaaatgcaatctctctatggtcaatctttttcctattgtcttgtggataggaatagcaatgcaagtgttagcagcaagttgatttttggtgaggacaaggagctgctcagccaccccaatttgaatttcacttcttttggtggtgggacagatggttcagttgacacattttactatgtccagataaattctgttatggttgatgatgaggtgctgaagatacctgaggagacttggcatttgtcttcagaaggtgctggtggtaccataattgattctggcaccactttaacatattttgctgagcctgcttatgagattatccaggaggcttttgtgaggaaaattaagggctatgaacttgttgaaggccttcctcctctaaagccatgttacaatgtgtctggaattgaaaagatggagctacctgactttggaatcttgtttgctgatggagcagtgtggaattttccagtggagaattattttatccatattgatcctgatgttgtttgtttggctattttggggaatcctcgatctgccctttcaataattggaaactatcagcagcagaatttccacatactatatgatatgaagaaatccagacttggctatgcaccaatgaagtgtgctgatgtttaacatttttttggggttgaaacttgaaaggtgtatactgtatagtctcataattgtaaacacggtgagtcagggggtagattttttggttttcccttaggtagaaattggaaagtgttatacacaaaaaagaaataaataatttaaagttgattatagaactaggttccaggtaattacagaaaactggatcattacaaacataaacatttgttttgtacacattttaactgctcaattttgagcttatctcatttaattttaatatttgttctttctatatatgaatatatgatgttctctcttactatcattctggacatgttattgttttgtatattcattatcctcaaaggaaaactgctccgtatatatatatatatatatatatatatatatatatatgcacacacatacaagaaataaagaaacttggcaatgaagttctgtatcctgagtctccaagtcaagggggcaataacagttcgtggtttgctcattgttactatcctactttcttgtagactacatcctttaaaaatttatacttatttcctcttttaaaatacttttaaatgaaaaataaatcaaatggcagatggacatggtcgtttcccatatgtcgcatcagtgtattattccatggcttttctgttaggatacactgccaactttataagaaaaaaaatgcatggaccaaagaataggtcaactctattgttggcctaggtactttgacattaatctaaagaataatactacctacacgtcaattttatatgataaattttgcagtttacaagaaaaggggaaaaaaagggaaaagtattagggatcacaatccttctgcccaaggatgtttctctgtaaccaaagaattaaataagacaagttatgtgataaagaaaaacaaattataagaagtgttataagcattttattgtaagtgtattattgctataatctagctctctcatttctttctttctttctttgtttttttctttttctaagagttatatttttttacccttaaaatagagtttttttttaaatctttttttgtttttttgtttttatattgtgagagacgtttttccttattatgccgttatagtaaatggtaatgtttataggaatttccaaagaggaaatagctccatcaatgnnnnnnnnnnnnnnnnnnnnnnnnnnnnnnnnnnnnnnnnnnnnnnnnnnnnnnnnnnnnnnnnngtacgtgaattgtgatacacttacaagttacaaccactcatacaactctctcgatctatgacattattcattatattttacaattctttttcttttgtactatttgttgaatgagttgttatacaaatattatttctcaatcaacaatagtggatggtggaggttggtgagtccacaatatagaggacggatttaaagtgtatagtttgcatatgctccggtgtgggtattgtggaccacggatttaaagtgtgttatttgcatattttaaataagtaattatatatgaacacttgtatatcaaataatttattaatatttttttcttttatattatatcatttgacatgtaaaagaaatatcatatatacactttttttttcactaggaggtggcatataaatgttagatgtttatgaattattgtcatacttaaatagctctgcccaagaaattcaaaagaggcccaagtaatttatttttagacttgatatttttaaaaacctatcttgcaatttattattttatttaaaagcttattttatattaaaaaattataaactgtaaaaattaaaatcacgactactcaatacacaagacaaatgtgaaaataaataggttagactttataagataaaatatgaatcnnnnnnnnnngaagcacatgtttggtttggatgcgtttttaaagagatgattttttctataaatcctttatagaaaatttgtaaaagatacggttttatttttaaaataagctgaacttaaaatgacttctaagttttaattgccatagtacataaattaaaccgtcaatctcagtaatatttgtaaatttaccttgtgaaaaaaaaaatattggattgattttagattgtaatttttttctctttaatttctaaggaaaatgatacatatgcccctggagaattaaaaaaaataattgaatggctttatgaaagaaaaaaaaaaaaattactgttgagagtgttagtcaaatgtaaaaaatggtcaatctgagcctggggtttcagctgggcccaactaaggaaggcaccggcccattagggttttagtttgcatatatgatcctttgttgattagctcgtagcagtggaacaacagttgacagaagcaatcgaaatcggcggagatggttgccatgagggtgggtaatgttaatgttaatgttaatggtttttgtgtttgatttagtttgcagggtgagtttgtggaatttaacatgtgaatgtgattatggttgaagcagtttcaccagtaccaggtggtgggaagggctcttcctaccgaatccgatgagcatcctaagatctaccgcatgaaactctgggccaccaacgaggtccgtgccaaatccaagttctggtatgtttattgttcatctctatttcaaatgttgtttattcgtattcgtactaattcaataataaaatgcagtcttttctatttctgatttattgttattattattgacaatgttaatgttaattgtttcaggtattttttgagaaaattgaagaaggttaagaaaagcaatggacaagtgctagccatcaatgaggtgtgcacttctcaattttactagtatgtttctgttcgtctcagaaatatcaattattgcactacaatgaattacttttgagcgctagttacttattaaaatgattttaatgaggctagatttctacgttgaagaattctagaggatttttcttttttttttttttttatataaatatgatactgctgggcttaacttgtgcattaaatttgnnnnnnnnnnnnnnnnnnnnnnnnnnnnnnnnnnnnnnnnnnnnnnnnnnnnnnnnnnnnnnnnnnnnnnnnnnnnnnnnnnnnnnnnnnnnnnnnnnnnnnnnnnnnnnnnnnnnnnnnnnnnnnnnnnnnnnnnnnnnnnnnnnnnnnnnnnnnnnnnnnnnnnnnnnnnnnnnnnnnnnnnnnnnnnnnnnnnnnnnnnnnnnnnnnnnnnnnnnnnnnnnnnnnttttttttttttttttttttttatataaatatgatactgctgggcttaacttgtgcattaaatttgtttaagttatgtagacatttgaagaagggtagacataatgctacatatagagaccctgttaggtgtggatttgactacgggaagtcatttatgcttaacttacctatctgttgggtagatcacgttatttctctttttctgtttttatttttattgactatggaagcaaatagttttcttgtcaatttttgccaccggtatgatggaatctagtggcgtaggtgtaggaatgtagataaatggagtgtactcgagtcatatggtgcattatttctgactaacaacctaacattagcacacaggaaatggtaaatgaggtgaaaggttttgaagtttggacatttggtgaattatgatcttatgaaagcccctttaggaaagaaatacttgaacaaatatttgtgttctaggttccaattgctgtcttattggacaatggacatggaggtttgagtgtttgtactgattgcagatttttgagaagaatcctaccaagattaagaattatggaatttggctgcgttatcagagccgcactggttatcacaatatgtacaaggaataccgggatactactctgaatggtgcggttgagcatatgtacactgaaatggcatctcgtcatagggtgaggcatccatgcatccagataattaagactgccaccatcccagctaagctgtgcaaaagggagagcaccaagcagttccacaattctaaaatcaagttcccattggtgttcaagaagattaggcctccaactaggaagctgaagacaacatacaaggcatccaggccaaacctgtttatgtgattcagttaatggaatttccctgcttgtttgattcattaagtataaaaaggaagagcttagaggtgatccatgcagtgacaaacttcgttgcctgcaacatagtttgcattctttcaagctctggagattttgtttttgaaagatggtgttttatttaattttatatttttgcagagtaatctattttactcattctgatgtattcgataaaggttgcttttgaatttagcgattacttctttgtttcgattctgggtttatcacttgttagttgatatattctctctgatttttggtaataaatattttagaccaagcatggctaatgaaggacaaagctttaagtgtataaccttgagtgttttttgtgtttttaaaatcatattgaacttttatctcaaatttctacattgatttttaatgccagactatttatgttactgaagtgaaactgcagaaaacactaaaacaccttagcaactgcacctaagttttgtttgtcaataaaatttatttctttggaagaaagacgaacaaggcatgtgttaattcagtcattgccgcttcggtttttattttaaacttcaagtagggcctcacttcattactatttattatctagcttattagggtagaagtaacaacatgaaatttaatgttaaattttaagtaaaataattaaaataaatgattaatattggattttaataaactattttgttaagttgtatgacagggattaacttatcttaaaagtaatcaatattgtaggctggataactattataaatttgttttaagattcttttacgtacatttacgcactcttcatctgtatcttatgattagtgtgtaacttcttttaaacgggtatactttgtgcttgtgcatactcctgattgatgacgaactacatcatggtgttagtcaaaattaaatcgttgcaatttgctcactggtgtaattaaaaaaagcttttgtattattagtttattaacttttgatttttgttaaatgacaaaaaaaaatcacttggtaacttgaactagacatgtttattacttgctgcacaggattatcctgtcgctcgtaagcgaatttacatttactaaggaacacaaattgaagaatgctataaaagtaataaactaagttagtaataaaaaaaaaataaactgattaagcaacggtgaagggttaacatgagggaccacgtgcatctaccttttacggttcagcattagcacttgttaattattctattcccagtgtgcaagtgcagatataattttaactcacaatgacaaataggttatatgagttgtgactgtctctatttactgtgttttccatatcccataatcatatttgtgacctaccattatcacgcagatgcaagcatgagataaaaatataggaaaaataatactgaaaaacttctaattgcaggtctggtaataattagagggacaacgttgaggttttggctcaaaattttaaattatgtgaaatgttaagaagtaatcacaaagaaagggctgatgattaatttccttgagatggattggtcgtttaaaatatggaaaaatattaacctcgaagctgcatgaaagaaatgtgatttgatacgaacaacaatgccatgtctaaaattgttaacatttttttttaaagaaaggaaatgacctttggtagagtttgaatttattcacttacttttaatgttttgttcaagcatgttataataatgtgtgttgagcagtgggaaacagaagatagtgtttaccagggaagtctaccacgacccactttgtcttttagaaccctccatcgaaatctgacatacttttttcttttttctgaaactccacattctccaccataaacacaaaaagcttgtggaagttaaccccacaaccacaagtttgaaatctcatttcgttatatatcccaacaccccactttcataatcatcatttttcatgcaacaaccagtgctatttagtctattattctaacttcaaacagaaatatataattttgaaggttaaaactctatcttttttcggcttattgatgagttctctctttgcttcaagttggtctcattctctcctgatttggtctcaactttttagttgtgcaatctgagaagaaaggtaagagtgctatgaatcttcaaacacacatacacatatagagtcatgtatgttaccttagccagcttgagaagaaacatatacaaattccagaatgtcagtgtttctgccttgaagtcttattcactggcagtggagattgagttggccatcatcatattttcaataaaagaagaacgggagttcagcaaaaactcagttctttcctctttcaattaagtattgtttttatcaagtttctccttgttagcgcatctcaagagcacaagaaagctaaaggcagacattcaagcaaaaaagaccataacatcaaggtatttcattcctgcatggcattctttctaattttgatcaattaagttggtattataattttgtatattcttctccttgtctacattgctattataatcctctattaagttttgttttgaagttacctttttattgtggttgttttatgtatgaagatgagtgctagacttcagttcgaaatcacactagctacatgggtttctcttgtgggcttcaatggcgttcttaatgcctattggtatactagtcatcagactgtccaacagagaggggaatcaaagaagacttattattatattttatgttcatgcagtttcgcaggaaagtgtatctaaacctaaaaccgatcagttacattataattataaatttaaatcatagatcacaattttttttgggtatatttaattagtttcttttccctttacttggcaacccatatttgtacaattatttatatcgtttcagtttagtttagaagggtcagttgtcccactcattaacttctaatgatggtggaatggagataagaataacaagattccaattttacagttaatttgtttgtactaaagcttattagtcactacataaggtcaagtgaggggtattgcatctttgtctattggaaaggactataatgaatggtttgaagacaagaaagaatctttaagaaataatcttcttggttattggaagttccaagctttatttgtctcattttttaatagagcatgtgaaaagaactatgcaattatgctgttgtctgtatcattaatcaacttttagctcaacttataaaaaggccagaagtgaatgtacctctactattaacaaaagtaaataggtttattttaaagctttcttttcttgcattgatccttgccttttttattagttatatgcacgttttgtatttctgttcaaaagaagcttgccgtacttcttgccaatgcaggaacaatcatgtccataaaaaatttcaacaactccttcagcaataatcatcaaagattaggggtcgcattatatggtattatctggctgcaagttctaattggtatttttcgaccacgaaggtgaaccaatgaattgcttgttattaagaaaatctatgcaatatattggattaggccatttagcatttgctaaataccaaacttagacaatgcagtcaaacttttcttctcttttaaatttataaagatttttcatgttctatgttcatattttctagagagccagctttattaacagctacagatttctgtttgcgaagcatgatgattagggtacaactgttttcttgttcttcgcaggggatccaaaaaaagaagtcttaggttctatgcacactggatagtgggaactgcagtgtcattactgggtgtgctgaatgtatttataggtttacaagcctaccaagaaaaaacatccaaaagcataacaactaggaatatatttttcaccgttcagatatctttgattgtgatattctaacttcttcaagaaaaaatgggtctacatacaaaaccaaggagtgatttgggacaactaactactgattcctacttgataagaaaaaaaagctagttcaaatgacaagaatgcaggcatgaaggctgagtcttgctaagaaagatgaatcaatgccttgccatggatgcaagtatttgaaacacataagaccacagatggacctcaattgctttccctaagataaaatatgtttgtgtgggtttcttttttcagagaaggtacagtcattgaaaactttgtaatatcttcccgcgagatacattttttttgttgtattctcctaacaatcaattctgatatttttatcaaaccttgatgtggacgctggaatacttcatggagatagatcaatatattatccatgatgtttttttctatgtttgaggacattgtttgtcagtgtttataagcatttcaaaataaaaagaattagctaaccaaaggggtaagacagacactctatcactaacacaggagaaaacaaataataaggtaagaaattctattaatatcacattgatatatcacttaagtatcgctaactatagtatttcaaggaaaaagctgtacataaccggttaatatagctattcctagtattataaaaggtggaagaatcacaaatgctcctatggttgcaaagaaaactgaatcattcctttgagacacttcattgaggtaaccttgtctcttgatatttctcttttgtgagatggtcaagaacttcgcactcgctttcttcaagtttttacctaggggtatggtgaaatcatcattcctttctccaaataactgaacgagctgctctcggattgtaagtttgcttccatcactttcataacctataaaccagaaaggttgaatctttgtaatccttttcccaatattgaaaaaaaaannnnnnnnnnnnnnnnnnnnnnnnnnnnnnnnnnnnnnnnnnnnnnnnnnnnnnnnnnnnnnnnnnnnnnnnnnnnnnnncagacatggctataaaatttctattctttcacataactcatgagacaaacatccatatcaggagtgattcataacatagagataaaaggcatgggtgaatttcaaaagttatgcaagatggggagaaatagacatatgatcataccaaaaatatggactttactcttttaaagtgagacattaagggtgcatttacaattgatttgaatccaaataacttgtaaacttgagccacttcaaactaaggataaatacatccttactttctcactctacattttttcttatcttagcggagtcaaatatttactcgattttcaaactttcatgctagctatttacctcccatacagctaccactgctaaacacattatctttgatgaacaaatcatattacaacacccaaattctaccatgaatttggtctatgctgagtagtactatgtgataccaacgttattgtttctactctaaatgttttatactatgcggccataagggggaaagataaggtaacatcaaaggcaagctctttcatagtatcattgaaattttaagatatggcagcaacatataatcttgtaacttgtgatttcaaaggcactactcttactttcaatttttttcccattaaaagtattaaaacaattacattctccagccatgtctatatcttcagcatatttcatttaactaacaagttaacaacaaaacagagaaggggtttctaacagtgataaaatggccttacagaaacagaagacaactaatctgtctcccctacacgtatcattgatttaaagaggacatgttagcttacgtaccactattaggtgagcttgtagatgtaagttgctccaaaagatccagctgtgcacgagaagaagataaagatcctaacaacacaaagtccccagaagccaagtcagacatgaaggagaacctcatattgtaaaatttagaagtatttggtagaaatttaaactggtaagataaaaaaaaaaattaagaaaatttgagacagtgaagaaatcaaacacatgactttcctacaaatatttcaagtttagtagaagttctgattcatttttccacttgtaaccatgtggatgcaacaaatattaaaatataactgacataatgtctcacttttctaaatatttgttgtctcccaatcatcaaagaaagaatatattttttaagatataaatcaacaaccagtatttgttgtattgggtcggagacatgcatatctttcaacccacatgatttagagactaatcaattactaaatcattgatccaaaaattttttacacacagaattaatcaaatataaattcttccgttaaatgaattattctcttacaggtgaatgcaattttaccatacacatatggttaatcaacaaatatggaaattcatggttatccccataagcccatatttgattcaataataataataataataataataataataataaagagtgggtaggaattgttagcgtatataccattagcagcagaagcatcttcctgtgtaactccagtgtcagtcccttgtgtttgagcacatgttgtgagtaaagaggaagaaggatggtagaatttgatgaggttgttgtgtttatgggtcagaaaagaaggcttggagtgaagagaagcagtgctgctgagattgatggccataaagtgaggttttttggagttagttgctaatgccattcattttgcagtttcaggtcggtattttaattggccaaaggcggcacttccctgccacaaatattatctgtggaggattctacttctatgtaggaccacaaaaaaatcattcttctaaatccccaccgttcaaaaatatttttctttcactaaataaagacacaatatgtaattttttattattggatcattcttataaaatttaatggaaaagtttgtttaaacttatttttttaaaaaaaataagtgttcatttaaataaaataaacagttttataatttttagaaagatagaaatagatcaaaatttatctgaagaaaggtaattaaacaatacttaatgaaatatgatataaattgattgtgccttagtatgaaatggaaaaaaattaataagtttagtagaggattaaatttattattatctttatgtttcaaataatttctttttagtcatcttttttttatctctcttttttttataacctttttgttaaattcatatatcactaaccctaattaagtttgattaaaaatacttgtgtgtatgttaattcattcatgagattctaaacaaaaattaaataaaaattattcattaatatgtattgataccaagtagaaataaagacacatttctcaagtacaacacatctctcaagctgcaacagtcccagctggtactttaaggctttgtttgggagttaagaggggaagggaaggaaagagattcaagggaaagagaggggaaagaaagagaggaaaatgagggaagttcattcctccttgtttgtgagttaaaaatatattaagagaaggaaatgaagaattaataagatattaaatgtgaaaattatataatttaaatataaaaatatattaaaaatatattttaatatatttttgaacgtgtaactggggtaggatagtaattttaattacttttccttcaaaaaactcccaaattgggggaactacaatttttaggctttggaggatttgagaggagttttaaaaatcctcaaatctttttcctcaaaaattaaaactctcaaacaagaaaatatctctacctaaactttttcctttcctcccttcttctctaaaattcctctcccaaacaataagttgtctatcaccttttgtggggtgtttattggatcggatttatctcatgaatcccaccatcaaagtcaaattaaatcaattaatttgaattttgaatttattatttttcaattcgaattaacttcaaccaattaaaaaaaaaaaacttttaaattaatatattttgagatagcctccttttaacaggtccatgtcaatcactcaaaacaccaccgatgatcagagagctgccttcaaatccttacctgcgttgagagacaacaaattaacacattatcataagctttcaatactaatttaagttaggacttgtttagataaacttgtttaaaagaatttttaaaagaaaaaaataaaagaaaaaaattagatcaattttttcgtaaataaaaataaattttttattaactaattttcacaaacttactaatatagtttctctaaaaaataaaatgaaatttacaaattaactaataaaatacttacagagaagttcatttcattttttttcttctaataatatttctaaacaaatttacatccaaatatgtccttatttcttatttcttatgaattagatctacaccggaatggtcgtccaatgacgcagcagcagctttggacggtgtcaagtctatttttaactgtttctctgtgtcatctattttttgcctttaattgtatttcgaaattagtgtgtgtatgagatgatatagtcatatagccccgtttatttaaatttaaatttatttgttaaaaaatattcttttaatataataactagttttctgtttcttttatgtttgtctaattcacctttatttttattaaaaaaaaaagcaaatttttgtttttttgataagtaaatcttatttatttcttaaaaaatcataggacagctatacattgacaattaagtgccattatcagacaaattaaaaatgaatatgatacatcttaaaaaatgaatttaatacaaattaatgagatcatattgcaaaccttaagtttggcagatcagcgattccaaaatgggcaatggaacctttacggtatgtcttttttttccaaaattcatgcagttgacaattttaaattgtaaattttcgatagagttaaaccagtagtagcaaataaaagactgtttgaaactcaaaatgacaatgaagaatgagtttgaagattctgaattataaaggaaaacaaataaatccgaaaaggatttggatggaagctcgcaacgtgatttgccttcaatgttaatcgggcctccttcgcaacttcttttaattttattttaagcttcactttaacacttaacttcttttataaatttaaattctccaacttatttcgtcttatgtttatttttgccgttactttttattatgacacaggtgaacattgaactccctcagggccacaaactgaggtactcgaatttttatgattattggcaatttactgataaaaaatcttaacaaccatttcatttgccgtcattatttgacagcatagcagttacattacccataccttgataggatcttctagtttacataaaagataaaagacttcaattttaacaaaaaagagagattataagtcataacgtgaaataattacgtaaaatattgcgaagctgcaacaaacttgttgagaaaaataaattaatgaataattagataaagatagtttacgctatatatgaagatattggcagacatacgtaaggcatgatgaaataatcgtttacatgtctattaatcatggggagtatactacagcacttgtttctacattccatcaaaaggctttatttctctacattgaaaagtaacaacaaataatcaagaacttcgagattaaccaataacaataatttcatttaaaaaggaaaaaaaaaggacggaaaaagatgaatagaaatgaaaaaaagaaaaaaatatattaaatcatttaaatgtttgtacctcatgcttgctagcagaagtagcaggcctcttcctcatgtttccacaagcaaactcttttcaataactttcaagaagcaatatgagaagtagcagatgtggtttaatttgctagactacattttgtttactggatcatgactttgaggaagtctgatctttttcaatcaaagaagaacccaattgaagcataagaggataaacagggctaaactccttatctcctctgctcctcacatttgcagcataatcatcaagtgttgctttgatgcccttccagatttgatcctcccattgagaatctagccacagtgaatactgcaatggtgttagtttgttcctttgcagcggtgactgcaattcttcaggagcacgggtatacagatgatgaagtatgacatttggtggcagatcttgaagaagtggtgatgatgcaagctgggacgtttccaagaaaataagcggacgaaatgctctaagtgcacgatatggtgcacccagttgctcaacagggaacaaattttggcccacagctagctccaattcagccatatccctagccatcctcaacttgcctgattctgaaagtggtctcacaagagatgcatgtcggatgaagaatattagaacacgtgaagccatgctctggacaagcctggtgcatatgttctctgtaccaggagctgttgaattcctggaaggcaacaacctagaaagaaactcactgcgaaagtgaagaatacacttctggagttcctccatgtaaggtgatgcattgttgtccatagcagcatccattccgagcactccaaagttatgatcatgtatttgtaatatgcaagactcaagacgatccagcattgcctggaataaagctgttacagaatcacaggcaacaccatatatggcacctaatgaagcagacaacacatctgcagcaatactgggcattcctttaagtatagatgatatctgtgtatgaacatcttgcagatgctgacacaatgtaaagttcttgagctgtgctggtgttgcaggaccatttacttgacgtgattcaggaccagtggatatctgtcataacaatgacattgaacaattaaaagattagtaactatgcttctatagtagtcatcctcccttcacttgaataaaatggactttgggattctatatattgcaaaactcatacacaaagaagaaggggaaacaaagcctttaggttccagagaaaacatacagcaacagcacttcaggtagtaattatctatctccagtcattatgtctcaccataccatgacaagtgaccacacttcaggtagtaatattggaaaaatattatataagtctagcaaaaatattaattactcaacacactgaaaaataaaatgagcacgcaagttaaatgattgaatggttgctgatcactacaatgtgatacagtacaagtccaataatacaatacacatatgaagtataaactcctcaatgaaagaacacgatgttctttatgcatgcagttaacaatgccataatttactgtgcagtcaacaaaactttccttcttctgtgaatccattctttccttgtaataaaatattctttattccaaaaatataagtagttatataacagctaactttatagcctgccgtcctgaaaacccatgatctagatagcattgaattcatttctaagccaataaatgtagtgcttaaaacatctaataagcaacaatgccttagatacaataacgtcatttttgtttacctggtattcagctcgttctgcaagaagaatcaaaaccttgccaatttcacgcaaaacaagaagagttaagcgtgcatccatctgaacagtttctatctcttcctgaatgcgtgatataaatcttgatatttgttccttggagggaacactaccacgactggacattggaaatatagaattcactagatctgaaaggcgactcaagcaatgagccaaaaatgcattctggaatatttcaacagctgaaattatcttctcttttccagacgaattgatagctggtaacactcctttgacatctgtgtcatgtgaaattctttcaagtagattctctatcatggagtaaagctttggatatcccattgtaaaaatctctttaacaaaacttgatgcagtgaaagcagacttcatttggcttgcaaaagcctttgtaatggcctcccacactcgatctgttagcataggatcaccttcctatgccgcagcaggcaacatccaaaaatgagataaaaaaatccaatagaaaataagaaagtgtgaacaacagtagctagaatatgtatgatctgatgagtgttcctaggtaagaactcaatactgtaaagtataaatgaagacccaaatccctaggaaataggaagtccattgaatctgtttatttgcacattgttaagatcacaattttttccaaaatctaggataaaagaccttactaaaaaaatcaatgcaacttcttcatacatctaaaatattgatcactttattacactctgaatacatacagaggagatgattttcaaaagattgcatattgatctcattgcatccaaaatccatctagcggtgtttaatgcatcagaagagaatggacaggcatggacttttacaatttctctactctgcatcctatacaactcttttgaagagagaaaggcctttgacaatataatgtggcataaagctggaagcctattaaaataattctacacaaaagagaaacaacaagcaattacccttgatctccttactccctcttcacttatgcataggtaatatagcatagcccaagtcaccccttggcatctgtttacagcataccagaggaaaagaagaccacaaaaaggaaagatttagaaggctggcaaatggtttgtattgcacagcaaatacttgattgatactaaaaaattgaaatattacagtcttgccttcttgtggtctctaacatttatagatctattaaaccagtgcaatagattcatagatcttgtcatgtcagtctcttcaaaaccaaatgaacacacgtaccgaaactagcaattaatgactcaattcaaacttctaatataatcctcagattcttccatttgggaagagtgacacacaaaataatagctctcaatacactaataaaatcgggtgtgaaaaactaaaaaaaaaaaaacctgtttgtgctaacaatttccaaactaattactaatattcaaacaccaaagtttggctggccattttgcataataagctaaagctaagccacagggtattcgttacacaattatgtcggtaaagtaaaccaattctacgagagaagcacccccaatataatcaaaatactatctatcatctacatatcaaactatggcgttcagaggacaaacaataatttctattgtcgtgtgatggacgcagaagagcatatatgaatccaaggcaagcaacaacataatttccttctgatgtaaacaaacaactaaaacaaaaacaatgagcctcacctgaatgacctcatcaagcaacaaaacatgtgtaaagggatcacgttttttagagagcaccctctgcaaatgccacacagcaacagcaatggaatgcaactgatccatgcaatttcccaacctatgccagagagcctctctagctttagcccctcctccaatgtggggcgtcccagagcccctaatcccaccaggaccgtacccacttccacccgaaatggtcttcatgtccaacgccacagtgacactcttagcacccaaacccttatacttattcaccacctgctccacagtgcccttcaattccccaagattgtagaaaacctgcaacccggtcccaacctctgcctggttcaacccttccattccgcgttccagaaccttcatcgcctcgctgcgaagcagatcgcccgtttccctgacccaattgagctcttcgtcgacggcgtcgatgccggcgagatcgtactcgtcgcagaggctgaggatctcgaagtggagctgggcggccttggcgagatcgagtttttcggggtcggcggcggccatgaggtcgcggagcttcttggaaaggcggagggcgcggatggagtgctggaggagctcggtggtgcggtggaggttggagagctgggcggtcttggcggcgacggagcggtgagggtcggagagctcggagcggaggcggcggacggaggactggatcgacgagagcgcggatctgagggtggagagggcgtggtccgcgtggtggagggacgagagctgcgagaggaggtcgtggtgccgcgagaggacttccgagcggagctggttctccaggaggcggatcgcgtggtggagcttctccgcggtggaggccggggagccggaggagagcgcggcggaggagaaggaggtggaggagaaggaaggggagaggaaggcggagaagatgggatccgaggccagagagtctagggcggaggaggagggggtggtggcggtggcggcggcggaggaggggtttttgaaggtggagaggcgttgcatcggagatgcgccggttgagaccggcgtcctcgccgacgctggtgacgccattgtgattttcgttttggcgagcgagcgacgaaggtcgtttagtctggtacagacactaggatggatagttactctattacttttgttttatgtaacttcttgcttctgtaattgttttgtgtgattgtgtctttttttttttatatataatttacttaccattcatgtgattttgattttgttaatgattttttttaaatttagtatcctcactttttaataacatggattttttttaagtgttgaagataagatgtttataattttttgatttttggataaacggataaagtgtgatattttgattagcaagcttttaagtttttttaagtttgctgttataaaaaaaagtgaaagtaagtttaaaatgatttaatgtctgattgaaattggaatacttgaaggtacttttagcatgaacatgcttcctccaaagtaatactcatgtttttgtttgttttgactaataaattgttacttcttatgaaatgacacttcgaaaatcataaaacctaaaaataacgggttcacaaacatgttcttcgtatttttttgactccaatgtacctttagaggtatttgaacgatctttcagacagactaaaatatgtcttactcattgtatacattaaaatgcatatttttgtattgaattttgtaaaaatacttttgtaacattaaaccaaacatagcattaagaaattcagtttgcaaatttttgtaagaatatatataagaatttgatgactttaagtagagaaaaattaaatggctaacaaagatcacatctaaccttgtgtaccaaaacccattgctcctactcatctgtggatcacctaaccttttaacgtgtcaaagatcaaactttttacttgtgagaacttctacaagtgacaagaatgcatctattgatctagaccattctaaacatgcatgaaattgcatcggcttttacggccttccacttttgccaatcctaaacaaattgaagactgaacttatgccaacaagacatgtagacacaccattatctatactttatctaatgaactctttgatgtctactatttctacaaagaactgaaaaagatttgggactccatgaccttgaaattcataactgaacgaacatttcccccctcccccccgtaaaattggtagttccataatgtaatttcactcaaagtggtaatttctgcatttacaataatagaaaccagtcttctctcctcccagtaaataaacaaaaagcagacagatcacctccagcatatttgttcaccaaacagtttctcgcactcttttatacaatatatggaagaaaaaaagtacgaggaagagccaaaattgcaatgctagggaaaattgttctccagaattcatcttttatgctcttcaaattattcattccaacctataaacgtgaaaatatgtcaaactatatatataatatatgatcattcatcatctcatatcttccaatttggtgcagaaaattaagctttcaaattataaaacagagcaagatgggagtgtcaagaaggaattgagtaattgacgctggttaagcaaaaagatgaaatctataatgtaataaagcataaaagatatcattgcaagcttaatttctatgcctattctattactaacgagaaacctggaactgtaaataaatataatttttttattcaggaatcaaagataatataaaaaaatttacaacaattctcacacctgttcaactaactaactgaattagaatctcttgacaaataaatacaattgaagcaaagtagtaatgataaaaaaatgaatgaaatgacaatatttggacaatttttttctataaatattttatttgagaagaaaataaaaaataaaaaaactttttttgtggtgaaattagctaaatcatattttctgacggaacaagccaaagggaggtggcggtggacggtggtgatgattcagaagtggcagccacaacaaaggtagaagaaacagagggtggagacaaggactacagcctcagccgcgtagagtatcttgaaaacgacggtgtccatgatggtcgtttgaagatccagtcgtttccacctaaacggccacgacaccttcttcaaccacagtttgctcttcttgttcttcttcttctcctccatcaaacttagacacactctctattatgtaattttgaacaaagagtatgagctgttgtttgtttatatatagaatattgagatagggttgcatgctttggatgcttcaaagacaaggatgtttgctggcccatgaataggttgaaccgttgaaccgtaaacaaatacttgcactttatttatgaactctacttttctcacatttctccattcctgctccttccgacactttgctctcactcattaaaaaattccaccaatcttgttcccgatttttagtttccgttataaattgtaatagtagataaccagatttaaaatttggtaatggttacaagaattgtaaaaatgtgagataatgataaattgatatagaaaaagtaaaaaatttaaatttaatttttgaatatatataaagtatgatagattagtcatgtagataatataataataaattaatttttaaattttataacttaatcttaaattaatttttaaaaatataatttattgttaaaatgattaatcacattttttcatttgaaaattaaatttgaatttttatcttattaaaataatttcttaccttcttatatttttaggtatcaaaatgattatatcaaaagatatgtgaaatttctacgagatatttatttgcttttcattaaaaatgagttttttttttagagtttaaaccctttaaatgaatcttaaagggatctgtttcttactaagtttggagatacctaaagtttaaaaaaaaatgaaaatattggtaaaaatagtggagttgttgattctggtactgtaaagtttcatttcatgtgttgcatgtaaatttgtattggagagttgttgggggaatgagagcgcgtatgagatttaaaagcttgttaaagatgaagggacatataaaactcttctttttatgaataacaaattctgtaacaatttgatttgatatagaataccatatatcatgtgccagaaatgagaaattcgactggcgtgttcgtctgattggtttgatttttatttaaaaatcatttaaaataaacttaaaaatatatttagttcagtttttatttaaaataaaattcagatcaaattataaactaatattttgacggttgatttggtttgtcttttacaatttttactaaaatattattttattaaaatttatatattttttttcatattttaaataaaattatacattaaaaattattcataataatttacgaaacttattaatatgttaaatcttttataataaaatctgtaaaatttcatttattttaaactaaatatatcttaaaaaagtagtatgaaaaataaaataatatgtattatataaattttatatacataacattacacaacattataaaactcaagtaaaatataagtcttaatataaatattatagtttatatcaatttcaaaaatacaaactggcaaaccaaatcaaaccannnnnnnnnnnnnnnnnnnnnnnnnnnnnnnnnnnnnnnnnnnnnnnnnnnnnnnnnnnnnnnnnnnnnnnnnnnnnnnnnnnnnnnnnnnnnnnnnnnnnnnnnnnnnnnnnnnnnnnnnnnnnnnnnnnnnnnnnnnnnnnnnnnnnnnnnnnnnnnnnnnnnnnnnnnnnnnnnnnnnnnnnnnnnnnnnnnnnnnnnnnnnnnnnnnnnnnnnnnnnnnnnnnnnnnnnnnnnnnnnnnnnnnnnnnnnnnnnnnnnnnnnnnnnnnnnnnnnnnnnnnnnnnnnnnnnnnnnnnnnnnnnnnnnnnnnnnnnnnnnnnnnnnnnnnnnnnnnnnnnnnnnnnnnnnnnnnnnnnnnnnnnnnnnnnnnnnnnnnnnnnnnnnnnnnnnnnnnnnnnnnnnnnnnnnnnnnnnnnnnnnnnnnnaataaaaaatcatccaaaaaaatcaattttgttcgatttttgattttttgaacagttttcaatttttattttgagtttttttgaatttgaacactcctaaaaatcaatgttatatgtgaaagaaagaaatgtgatttttatccaatttttaaaaaatgagtatttaaacttatacatattactagaggtaacatatcatatgagttattgtgagtaataatgaaagcattcaattacaattattaggttcaaattatatagattcctcatatacaagctgatacatttttcaagataattaaattaaacatatactacccgttagtaattaaagtcgagatttgagaataaaaactattaatataaaaataaattttaaaatggttaatagtttgagaattttaaaaatgcataaatattaaattatgataattaaagtcatgttttatcctctaaaaaaattataataaaaagatgttcttatatttaatgagagtactgtaaatttatataatataaaggttggtaaatgaattggatcaaagcgcattaagttatgtttgtaatattcctcttaaatgtttttagttgctgaaaaaaatgattttaattttagttcctacgatttttattttattttgatctttcattttatcgatatttatgtttgttgaaggattaatacaattctcatcatttatcaagatttagggtcaattattaaatcatatacaaaatttttctctttattgtttctatattttaaattatattattattattctattaagtgatatgatgtgataattaaaaaaaatgtcatcgtttaataaaatgaaagtagttaatggaaataattaagagtgtacatgtacataaaattgtttaagacccagaaacatatttaaatatttttttacgtattgattatttacgtatgtatgcaaagaaaattgaaatgcaatattcccttacaaacaccaaaagtaatgtgattgtgatctttccagccaatctcacctttgtagaatatataattatatatactttttatgaatttatttatacacaaaatccctcaatccaatattttgtataattgattttgtttgtttataaataaagacaactttgttactaatagaaaacatttttgcagagatgtttattgttttttttggttgcgtggagcaacttgtttcccgcattgttgccgtgcactgcatgatgataacacttcacctggcttggtaacaagggtgtgtatataatataactagcaagtctcaaattaacaaaaattcaacaagaaggggaaaaaaatgaggggagcgtttcattttttatcgattacaattctgatacgttgataaatataatggaggtgagaaaagaatatccggattacattttatgcattaatgatcataagaaatatataattaagaaaactgatctgtatacaggataaggcattctcgtaatttttggtttgttaaaattacatgcattgagtaatttatgaatcttacataacttgtgttcataattaattgatattgatatgcctgtggaggtaaatatgatgacttacttttttgtcatgtacaatagcaacacctatgtaaatcatggatgaatgactacgaactcctgattatcaattgttggtagctgaattagcaaatgtgtgaatgaagatgattgtattgaaagaattatttgttatgtaacttttgatggatttttctatcgataatttttgaagaatttcttcgttagtaatttctgacggatggatccgtaggaaattatcgactgattttttcatcgaaaattaccaacggatatatacataaaaaattattgaaggaacaatctgtcggtaatttcggacataacttaccgacggatatatttgatctgtcgaaaatttttcacggactttaccaacaaatatatccactagaaatttccgatggataaaaaaaatctatcagttaaatttacaataaccattttatcaacgaatttttgtccatcataaaatttgatattaccacggattttagccgtcagaaacattttttttttttgcagtggtatattttaaaacttccgacttttattaaaccattcttaaattaggaatacgtcctaatatgcataccttatttccttgttaaactgttcctactttttactcaattattagaggttgatataatctgatattaatttatgaaagacatgcctagaatatcataatatttaattgttattatgaggtgagtttgaataaaatcaacttataaaaaataaaattgaattaaatgtttttatgaattaaaatcaatataatgatcatttaaatttattatataggagnnnnnnnnnnnnnnnnnnnnnnnnnnnnnnnnnnnnnnnnnnnnnnnnnnnnnnnnnnnnnnnnnnnnnnnnnnnnnnnnnnnnnnnnnnnnnnnnnnnnnnnnnnnnnnnnnnnnnnnnnnnnnnnnnnnnnnnnnnnnnnnnnnnnnnnnnnnnnnnnnnnnnnnnnnnnnnnnnnnnnnnnnnnnnnnnnnnnnnnnnnnnnnnnnnnnnnnnnnnnnnnnnnnnnnnnnnnnnnnnnnnnnnnnnnnnnnnnnnnnnnnnnnnnnnnnnnnnnnnnnnnnnnnnnnnnnnnnnnnnnnnnnnnnnnnnnnnnnnnnnnnnnnnnnnnnnnnnnnnnnnnnnnnnnnnnnnnnnnnnnnnnnnnnnnnnnnnnnnnnnnnnnnnnnnnnnnnnnnnnnnnnnnnnnnnnnnnnnnnnnnnnnnnnnnnnnnnnnnnnnnnnnnnnnnnnnnnnnnnnnnnnnnnnnnnnnnnnnnnnnnnnnnnnnnnnnnnnnnnnnnnnnnnnnnnnnnnnnnnnnnnnnnnnnnnnnnnnnnnnnnnnnnnnnnnnnnnnnnnnnnnnnnnnnnnnnnnnnnnnnnnnnnnnnnnnnnnnnnnnnnnnnnnnnnnnnnnnnnnnnnnnnnnnnnnnnnnnnnnnnnnnnnnnnnnnnnnnnnnnnnnnnnnnnnnnnnnnnnnnnnnnnnnnnnnnnnnnnnnnnnnnnnnnnnnnnnnnnnnnnnnnnnnnnnnnnnnnnnnnnnnnnnnnnnnnnnnnnnnnnnnnnnnnnnnnnnnnnnnnnnnnnnnnnnnnnnnnnnnntatcatgtcatcaaacaaaatattttgaaatagttgttattgaagagtttcttaacaaattaataatacaccttaagtgaaatataaaagaaattaatgaaataatccatcaaaattgaatctgagatcttttattcatttcttctataaatttctcaatatatattaaattagctcaggaattggacagatttcaacactttgtgctttattccatctcataatttattttatttgcattgaaaaatggaattatgtactaattggaacatttttcttttgttctccgtgtaaagtacaataatatttctctagttattattaaatgtagtaatagatgacaatagtgttattttcattgaaacaacatcgtgtgaaatacatgttatgtgttggatatcctttctaccgttgtccataactttatctatcaagtccttttttcttgtattttcagcaattttctcattgcagtgttgtcaaaagacaaattgacattatttcattgattccctaatttcactttggtatggtccctccaaaatgggtcaatcaagtggtcccagatactcatgtccacttatgcttagactttagctaatcattgcttacttggtttctccaactacatatgtcaatttccaattgcataatggctagtcatcatcaacactaataacacatttaattcaaattaatcggagttactgtaaatgaacccaaagataaattagaaaaaagaaaaagaaacttcttgaatttaatgactaactaccgtttcataaaccctataaaatataatatatcataaaacccttcaagctttattgtaccaaagccaatggagtgtggtgagaaattctcttattcagcttgtgctaaatatttttgatgaaccgagtagaattaaggagataaatgatactttcatttccttatttccaaaggttgacatggtgcatcggatgaaggatttcagactcattagtttatgcaatgtggtatataagattgtgactaaaatcattgccagtagattgcggaacttgatgtttcgtcttgttttgccatgccaaagtagttttgttcgaaacagacatgcctcaaataatatttttgtggcataggaggtgctccattcgatgagtcacaagaagggtaatgttgggtgggtaaacatcaagattgatcttgagaaagtctataatagacttgattgaagattcgtgaaggagacctgggaagatatccaaattcctgctaatatagtggatattatttgacactgcatatcgtccccaaaaatgaaggtgttgtggaatggagacgttttggaggattttcaaccataaagagaggtattagacaagaggatgctttaccctcatatatttgtcttatgtatcgagcaacttttttcaacttgttaatgttgttgtggaaaatgaattttgggagcccattcaactttctagaggtggccgaaaattgtctcatttgaattttgcagatgatattttatggtttgcaatgactacaaaggagcaggtggagactatcaagacaattctaaatttattctgtgagagctctggtcagaaggtcagcaatgagaagaccagagtatatttttcgaaaaatgttgcatggcaagcaaaggaggagattagccaattattagggtaccaacgtactgaagacttggggtaaatatctaggggttcctatccttcataatagagggaccactaagacataccaattcatcatagagagtcaatcaacatttaagttcctggaagtgagaactttatcttttgcaggaagagtcaccctaactagatctgtgcttcaagcactttcgtcgtatgtgatgcaatatatatgcctggctacctaagtctatttgagatgcagttgataagaaatgtcgtcagcttgtgtggggtgatattaatgaaagtaggagagtgcatatggcttcttggaaggattgtcaataaattcaaaagtccaaatatcaaatctaaattaaactaacatgattaaaatatttttatgactttcgtttttataagatagcaaataaaataatataaagagattttgaattataataagaataattaggattatgactcattagtatcatttttttcctaatcttagtcctaatgaaatttatttcctagttaattatcaattttcaaaatcaactaaagtttatgatcaatgttagctttttgtcttaaatcaatacatcaatgatcatagatctatcaatttaagtcaaaggataaaatcaattctaaggatgatcaatgaaaaataactaatctatcatatattatcaaaatagtttgatcatacaatttggtgcaaaacattctctatataaatctactagttagatgcaaatgatcattactaagtaatcaattgagtattagaatgatcgattctaaataaatattaaaaaaaagaaatttaagtaacataaaataatgagtaatttcattaagaacaatgagagagatatatttggacnnnnnnnnnnnnnnnnnnnnnnnnnnnnnnnnnnnnnnnnnnnnnnnnnnnnnnnnnnnnnnnnnnnnnnnnnnnnnnnnnnnnnnnnnnnnnnnnnnnnnnnnnnnnnnnnnnnnnnnnnnnnnnnnnnnnnnnnnnnnnnnnnnnnnnnnnnnnnnnnnnnnnnnnnnnnnnnnnnnnnnnnnnnnnnnnnnnnnnnnnnnnnnnnnnnnnnnnnnnnnnnnnnnnnnnnnnnnnnnnnnnnnnnnnnnnnnnnnnnnnnnnnnnnnnnnnnnnnnnnnnnnnnnnnnnnnnnnnnnnnnnnnnnnnnnnnnnnnnnnnnnnnnnnnnnnnnnnnnnnnnnnnnnnnnnnnnnnnnnnnnnnnnnnnnnnnnnnnnnnnnnnnnnnnnnnnnnnnnnnnnnnnnnnnnnnnnnnnnnnnnnnnnnnnnnnnnnnnatgcgtaaaaaaattaaaataaaacttaaagataaaaagagaagcctcattctttatttataatattgtgtggaaattctccttctatcttttcttaattaaaaaatattatcaaatatgatttaaattaattattatggtcatacaaaattatcatgaccgaatagcttcaaaaaattcatgatatttaactttttttttataaaaactcttaaacatctgtctttcacaaacttattctaaactgtgagttttatcaaataaattatatcaaaattcattaatatgacatgaacttacatcaaagtagatttttgaatacactattaataagtggatttttgaatctcagtggagccaagcgaactgtctgcatgaggagattaggcatcatgcagtaagtgattctggttatgcaacttgtggaggtagcaagatatatatatgactatttcataaaggtagcaagatatatatgacatttggcacttttagaattttgttatgacgttttttcataagagtttcttcaacttttacattgattttataaaattatatttatcttctggggattatccataaaaaaattatagaatatttcaaagttttttatgaatacataaatcatataagtagtttcccagaattttctcatagaattaatttgttaaaaatctaaaataatttatattgattcattttatttaattatataaataattaaatcgatattttttaaaattatttattacatatgcattttttaatctcattcaaaaagtaaaaatagaattgtaataaattggaaaaaaatgttttaaaacaatttaagagataaaataataaagtaatgttttaattcttaaagataattaatagtgtatatatatattttttatatatgcgagttattttaattaaataactatatatgtgtaagtatgggacgaggtggatgttgtattcatacccacatttatttttattagattttacgagtaaatctttagtttcagactcatctctaagcgagcaaatcatgtggaaactattattttatttagattgttagttaattaattgaccaaatgaaagcatgtattacgattaatcttgacccttatctaccatagcattgtaaatattagacatctttctgtagtaccgggctaattatttgggtgaaatgtcccagatttttttttttttttcaagcacagaaacctcatgaccaaaagtagtaggattgattcgcatataaaaatannnnnnnnnnnnnnnnnnnnnnnnnnnnnnnnnnnnnnnnnnnnnnnnnnnnnnnnnnnnnnnnnnnnnnnnnnnnnnnnnnnnnnnnnnnnnnnnnnnnnnnnnnnnnnnnnnnnnnnnnnnnnnnnnnnnnnnnnnnnnnnnnnnnnnnnnnnnnnnnnnnnnnnnnnnnnnnnnnnnnnnnnnnnnnnnnnnnnnnnnnnnnnnnnnnnnnnnnnnnnnnnnnnnnnnnnnnnnnnnnnnnnnnnnnnnnnnnnnnnnnnnnnnnnnnnnnnnnnnnnnnnnnnnnnnnnnnnnnnnnnnnnnnnnnnnnnnnnnnnnnnnnnnnnnnnnnnnnnnnnnnnnnnnnnnnnnnnnnnnnnnnnnnnnnnnnnnnnnnnnnnnnnnnnnnnnnnnnnnnnnnnnnnnnnnnnnnnnnnnnnnnnnnnnnnnnnnntaaaatatttcagtgttttttttttttttccttatcattatagcaatatcatctatattctctgaagtcgaaccagaaccttatttacggttttttttcttcaatatcttcagctttcatatttgatccggagacaatttcaatttatatttagcatattttttacctattttatttcggagagaagtttatattttcccattgtggacgataagcatccaacacagaataaatggttttcgtgagatgggatttgtaacccaacccactaatacacaaagtggtatagaggcccaagtagaatagttcgaagacccatccaatttctcaacagagtgtggaatgtttgggaaaataggtgggttcaccttaatagaggtagaagtatgattccctatgtcagccatcagagtgaactctgaatgtgaagcagtacctgcaaacaacaaaaaaacgaaacatgtctatctggacataccggcagtcagcgagtctatgagtggtgttactagtcaaaaaagcaccagagatgtacacggttcgcaaaaaaaactgtcttccggggacagttggtccaccagacaggcacaattctcgaggagcctctgtcaagttctgaataccatgttaagaaagatagaacaaaggcatttggacttgaacagtgtgtttcaaatacaccacgaatgatactttctatggacttattgtattgaatacacataaatgagaggatattcagtttcttaactttcctctaaatggagataataaaatgaatgcagaatattcgattctcaacactcaacaattcttaggattatcaagtcggttacatgattagatacacgaaaaaaatccaaggagaatgacatccgtgcttcaaaacttgggtgatatgccccaaaacatcaagttgtttaactaagatataactcttgacatatatgcccagcatagaggcaagccattaaacatgagccgctagttatggttgttagtatcgcacgatacacgattcgaatcgcacgatttgatccgatacatgctgaaaacgatacgaaccggaccactgaatcattttgaagttgaatcgcaacattgaatcgtgaaatcgtatgattcaaaactgaatcgtgaatcgctctcaagtttccgattcaaattttacgtgagaagataaaaccgagaagaaagaaaaaacgattcaacttgaaaaaagagtcacggaattggaagataaaaccgaaaagaaaagaaagaaaaaaagaaacagagaagttgcagaaaagaagccaagacgcagtgacgcacatagaaagaagttgcagagaagaaacgcaacgcacagagagttgaagacgaagtctctccgtcgtcggcgtcacagcttggggccatcttcgtcgctggcgtcatcaaagcttgaggtcctcgctcatggtggtttgtggagacaaagtcacaaacaaagcactggaggcgtgaaggtgaggctgcggaagagaagaccgtggcttttatttgggaacagaagacaaagtgttatggggattaggattttttatttggaccccagatccgatttacttcttgcactcccgtttttgcttactttactccttttggctattttttttcttaaaaatttcacttgatattgtaattctagatactgatagtgatagttatgataatattagtcttgaaatttaattactatgagaataaatggttttatatttggttacttatatattttagtacttaaatttttttttaatttggatttatataatattatatatttttaagttatttttaatttgtttctgaatcttacgattcgatacgattcatgatacaaaaaaacagctgaacgattcacgatacgtattgcgattcaacaaccttgtttgaacccaacccatagactctaatgtaccttcacgaccctttgaacacgtcactccactctctctattggagaaggtttgccctgaaccttaagatcatcagaaacaagtcgaacctggaattcaaacccatgttggctaactatgataccaaatggtataactaagaaagtccagtatactaagtttaagctattagtaacagcgtaactcttgacatataacatcctatataagatgcagactgttgcatatttaagtcaatttaatcatgggccaccatgctaacccaacatgcatcctctaggcaaatcattaggtttgttcaaaatttaactatttagcaaagggataacatacagcggttacagccacgtaggcctagtgctttgtattaagtggaaaaaatcagctagctgcagcagacaaaccaaaggaaaatcccctaatatcaaataaagctagatcactttatataacatccattgagtatacattgagtgagaaaccatccaataattctgagatgttcacctcaacaaattaacttcataaataaagcagatcaaccacaagaaagaatttgcagcatcaaaatagagcgaaagcaaacaccatatccatattgggtcaagcatccaattgatagagaacacgtgaattcaaatataggatatagaacagtccaaagaacatttcataaaattgcaaatgcagaactgattacctgctaatattcatattataaattactattaaagcaaaatgtatgaaatacataagaaaattaaaaaaaataataaaaacttccgaagaaactggatgtctacacagttctacttttggccatcagtgtatcatcaaagaggaaaatcaaactctaaaccaaaataatgcagcaaattatctactttgaaatactttaactgttcagacatcacacccaccctcaattcttactgcactgtgcatatcattaatattgcaccaatcgcataaaacagacattaaatccaaggatgaacaattcatccaggtcagaatccagtgattaaaaagatattcatacttctcgtaataaaaacaatgatccagaagcagattcccattctttgtaggtgctggtgataatcaagaaaaannnnnnnnnnnnnnnnnnnnnnnnnnnnnnnnnnnnnnnnnnnnnnnnnnnnnnnnnnnnnnnnnnnnnnnnnnnnnnnnnnnnnnnnnnnnnnnnnnnnnnnnnnnnnnnnnnnnnnnnnnnnnnnnnnnnnnnnnnnnnnnnnnnnnnnnnnnnnnnnnnnnnnnnnnnnnnnnnnnnnnnnnnnnnnnnnnnnnnnnnnnnnnnnnnnnnnnnnnnnnnnnnnnnnnnnnnnnnnnnnnnnnnnnnnnnnnnnaaaaaaaaaaaaaaaagagagtataggatgcaaacacacaccaataagaaatagaagtaactatcttttctttatcaacatccttttatccaatttgcatcagaaatgaaaatactcatccttaccattcagttcatccaaagcaaggcaataacagttcattaataggtaacttggtactgtaaatattcgtcctcatttactatcatccctagtaattaatgagaagtagcagcatgcattgcccaagtcgagacacgccgctacaatggtggcataaaagatcacaaagccgcagctatgttggtactgtggtgcaacacaaatggagctccagcagaagctggatgccactccacacatcacacacacacacacacacacacacacacacacacacacacacacacacacactaatctatagtgcttacaattaactactttgctcacaccaccaagtcatggtgaaatgtaatcaaccatcataacaacagttaaaataattcccagcgacaaaacaataaagacactgaaacacaacaatcaatcttgttattgttcaaggagtgtcaatattaaacaagacagcaaagcaaaaaatcatgtctaacgataaatctacaacaagtttgcacaacagaattcaatcaaagcttactattttttcaaactaaaagccatatcaattctttctatcatgagcaaccaaaccaaccattaaattaggtggctttggcaggatgattccccttggcctccccggaacaacagtcaccgtcatgctggtggtgatggtgatgatggtggtgctgcttccccttgagctgcttcctcatgtcataagcatcctccccgtcggcataatacttggcctccacatcatgaatcttgtatcccagggtcaccgtgtacaaattgaaggccgcacggttgctcttgcgcacgtgcagggacacgtactcggcaccaaacacctgaagcgatcaatcaaaattgaaattgaggggctaaaaacataatcggacgcggcgactaatttgtaatttgtaaatggaaagaaataatgggatgcctgttccatggcgttctgggcggcggtcatgagcttggtggcgaggccgagcttgcggtgagtgcggaggacggcgagggaggtgatgtgaccgtggcagtcggtggtctcttcctccatcttggcgaggacgtagccgacgatgcgggcgttgtagtcttcggctacgtagaggaggtggggccaggagaggatgtgatagaggtagtacttcatctggtagttctccggcaggcagaacaggttgcacgcctgcatcgccagtaggtcattcaccgtcgccttccttatgcacaccattttttcccctttcctttcttctctctcacgattagggcaaacacacaacgcaacacctaggagcagtgttttaagagctggggagccgattatcgaactgctagacttattaggttaatgggtcacgggtggaattggagttctactgggttaatggatcttgggtcaaattagagtctcacttctcgaatcaaattaggagttaggaccaacaagcaccacaacacttaggagtagtgttttaagaatcatatacaacatcgaatcggttgagataatgacttaatgagttattgatggaaatcgaagtctcattggattaatgaattattggtcgaatcgaattaggaccaagacacaatgcaatgcctaagagcagtgttttaagaactagacccatcatccaataagtgagacattggattaacgagtcattggtggaatcaatctcactaatcaaatcaatttgacttagtatatattaaaacaatataaatataaataactaacataatttgattaattaatatgctaaatttaaaatgatcatcattataagttatttaatatctcaaataataaccaatattcatgtcaatagaaattcaataataagtttcaaatacaaacaaatatccaatgtcttaaaaatatacttttttatatacataataatttattttttaatatagatccttagttattaattaaaataaaatattatgtattattttaaatttaactacatatttataaaactagtactttcaattattactttttataaaatatattttatagtactgaagattcaagtgaagattaattatagatttgtttttcctatttaattttactaattttactctataaatttcctttaattcctttgtaatgctataaaaacttgttttctgtttctgtactgctcctctgtattgtgtcacttcttggtgttgcatcgttatgaggtctcacacaaaaccctatgagagtctaccatcctagctttgttggtgttaatatattttttcttagttattcaattgatgttttattagtacgtaaaaatctcacctttaatggaccaagtttttttcttcaaaatacataaaattcttaaccaaattaaaagaaatatagtttaatcatataaaaataaaaaagtagtgtgtgaacaaaatttaaaccagataaagtctaaaaatagaaagagttgaagattgaacataaatagaaaagttataaaatcaaatagctagtttatcacatgtataaagagagagagagcaacacacttctatgaattcggaagtgagactactgaaaatagcattgtaagatagacttggtctggcaccataaatcattcttcttctccgtcaacattctatactctgacaaatctctcattgtcaatcaaacttcttctctctaactacttttgttctcttaccatgaataatttgaactttcattcttatctttcagtgtagctataacatgttcaacatccaatagatcttgccacggtaaattaatgttggtgtatataatttcatttacatttcttgttccattaatttctcttcaggaatcatcaccaagctatttatcaatcaaaatggaaaataggctagcactggaatacaatatacatgtagattttgttaattaattactagaaaaagtagtaaattatataggtgtaggtgttaggtgtagcaattagaaacaatgtcatccattaataggcaaccttcgaagaaatctgcacgtagttctggaggatcaacatctcaagggtcacaaaactctagcgggccaagtgttaagtttgcgagaagaacttcaagtggaaggtatgtgagtctgtcaagggatgacattgatgcgtcctcagacttatcaggggattacatgaactacactgttcatatacctcctaccccagacaatcaacccatggactcatctgttgcaatgaaagctgaagaacaatatgtttctaattctttgtttaccgggggattcaacagtgtcactcgagcgcatctaatggataaggtcattgattctgaagtcactcatcctcaaatggcaggctccaaaggctctgtatgttcaatttgtgatggcagggtcatgagggatgagaggggacatgatgtcactccctgtgagtgcaggtacgtgttattattaggtcctcataatcctaaggatattattatttaaggaattaaaaagataaaataataattgtaaaaataatatgaaagtgtaaaaaaattatataaaaaaacataattttctgtctctgaataagaatttttctctttttaacttcttaactaatgtctgaaggatacttgttagcatttgtcgtcttatcatcatttcttaattttgacattatttttatttgatttcttgttgagaattgaagagaaactaactaagttacataataataattcaaatttaggtacaagatttgtagagattgctttatagatgcacaaaaagaatctggtatatgtcccggttgcaaggagccatataaagtcggggaatatgaggaagacctcacagatcagtattctaacaatggggcattgccattaccagcgccagatggttccaaacgtaacgcaaacaacatgtcagttatgaagagaaatcaaaatggagaatttgaccataacaagtggttgtttgagactcaaggtacctacggagttggtaatgcatattggccccaagatgacatgtatggtgatgatagtgatgatgccctaaaggcaggaatgctggatcaagagaagccatggaagcctttgagccgggtaataccaattccatcaggcatcataagtccttacaggttaattaattatatcaatttatgctgcccatagtttgtaattataacgatgataataataaggtttaatacatttttcctttatctaatttaacattttgttcattgttatttttgtattttttctattttagtctttctaaaatgtgtttgttttattttttatctgtaaaatattttagatgacaatttttttattgtataattcaaaaaatattttggtactgtttaaaatactgtatatttctttaaagatgaaaaatacatattattttacgactaaaatggaaaaaattacaaaaaaaaaatactaaattgcataaaaaatgtatttaagtctaataataataattacatgaccaaatctatgtctatgtatctatttgcaggttacttatcttggtgcgacttatagtattgtgcttttttttacactggagagtggtaaatccaaataaagatgcagtatggttgtggcttatgtcaattacttgtgagatatggtttggcttctcatggattctagatcaaattccgaagctttgccctgtgaatcgttccactgaccttgaagtccttcatgaaaaatttgatagtccatccccatcaaatcccactgggcgatctgatctacccggtatggacatttttgtgtccactgctgatcctgagaaggagccacctctaaccactgccaataccattctttccatattagcagttgattaccctgttgaaaagcttgcatgctacgtttctgatgatggaggtgctctcttgacttttgaagccatggccgaggctgcaagttttgctgatttatgggttcccttttgccgaaaacacaacattgagccgaggaatccagacacatattttagcttgaaagttgatcctaccaagaacaaaagcaggacggattttgtcaaggacagaaggagagttaagagggagtatgatgagttcaaggtacgtataaatggccttccagattccatcaggagaagatctgatgcatttaatgctagagaggagatgaagatgatgaagcatatgaaagagagtggagctgacccttctgagtctgtcaaagtattaaaggccacatggatggctgatggcactcactggcctggtacatgggccaatccttctggtgaacatgctaaaggtgaccatgctggaatacttcaggtgccacacctacctagaaatttttatttttttaattttgataagagtttagctttgttgaattcagaaactcacatagaatcagagtagaccttacatattatttaccaacaaggtttatggacactgaaaatcgaactgatgtcttttttataaaatgagtatgttagttatcaactggaaccaacctttgttggcacctagctagcagtttctatttttatttttgaaaaaagtttagcagagttggatcacatagtattagagctaactcttaatatattatgcaccatgaaggttctcacattagtaacgaaaatcaaattcatgttcttcgtgaaacatgaatatgttacttaattggatcaaccatgtcaactagctagcaatttgagtaaccaataaaataaaagagatatgacgtgcatattcaaaatcaatttaacttaaatatcgtatataataatcgtattttaatccaacttttttgcgttaatgaatgtaggtgatgctaaagccaccaagtcccgatccgttaattggaagtgcagatgaaaagattctagacttcacagaggtagatacacggttgccaatgtttgtatatgtttctcgggagaaacgaccaggttacgatcacaacaagaaagctggtgcgatgaatgcattagttcgagcatctgcagttttgtcgaacgggccattcattctcaaccttgactgtgaccattatgtctataactgcaaggcagtaagagaagggatgtgcttcatgatggacagaggtggcgaggacatatgctacatccagttcccacaaagattcgaaggcattgacccttcagatcgttatgccaaccacaacactgtgttctttgatggaaacatgcgagcccttgatggtcttcaaggtccaatgtacgtgggaactggatgcatgtttcgacgatttgctctatacggattcgaccctcccttcgtggacaaggacgccgacaagaaagatggtaaaaagattcaagggtccgaaacgccgtccatgaatgccagcgagtttgatccaaaccttgatgtgaacttactccccaagcgctttggaaattcaaccatgctggctgagagcatacccatcgcagagttccaaggacgtcctttagcagatcacccagccatcaagtttggacgtccaatcggtgttcttaggacccctcgcgagccactcgatgctactaccgtagccgaagccgtatctgtcatttcttgttggttcgtctttctctatattaattagaataattatcttgaacaagagttttctctttaacaaaagcattttattttctcaaagagttcttaaagatttttcttaatttcttgtctatgtataataggtacgaagacaagactgaatggggagacagagtgggatggatttacgggtctgtgacagaagatgtggttacaggataccgcatgcataaccgcggatggcgttcggtgtattgcataacgaagcgagatgcatttcgtggatcggcaccaattaatctcaccgatcgattgcaccaggtgctgagatgggccacaggctcagttgaaatattcttctctaagaacaacgcattcctcgccagcaagcgcctccagcttctccagcgtctctcttacctcaacgttggcatctaccccttcacctccatcttccttgtcgtgtattgcttcctccccgcgctctctttgttctctggttccttcattgtcgaaaccctcagcattgccttcttaatctacttgctcatcatcaccgtatgcctggtgatgctggccattctggaggtgaagtggtctggtgtggagttagagcaatggtggagaaacgaacagttttggctcatttctggaaccagtgctcacttggctgctgtggtgcaaggactcctcaaggtgatggcagggattgagatctctttcacgctgacgtccaaatcggccggggaagatgaggatgacatgtttgcagatttgtatctagtcaagtggagctcactcatggttccgccaattgttattgctatgaccaacatcattgccattgcggttgcgttttccaggactatttacagtgccaatgcacaatggagcaagtttattggaggtgcattcttcagtttctgggtgcttgctcatttgtacccttttgcaaaagggttgatggggaggagaggcaagacacccactattgtgtttgtgtggtcaggtctcattgcaatcacactttctttgctttgggtttccattagcccaccccaaggtgctgaaggacaaggtgtagggggagattttcaatttccatgaaataacaatattattattgctaatgcaaggccaggtgggtgggtgtgactcatatgtttttagtttttctttttgtcttattattatatgtacgtaacagtcatgtatttttgtaaaccttcaattcacatgtcttaagtacataaataggacaagaaaaattagtcttagatcgaggtttttttcttttgaaaaaaaggtcaaagcaataataatactattattaattagtttatacatgacgacatgattgatgttcataatgtgcatctgggttagttactgtcattgagcattccattttttccatcttcaaaagcattacatgtttatgttgtttgatttattcagtagagtagatgaattgttaaacatcttagtaacttaaattaaagtgaactaaaggaaaaatgaagttcaaatgaatctgaaaacggactaattaaccttcaattgtttcactggtcaaattggtgccagaagaaaagggtttggcaagccttttacaggtacaattcataattcctcaaaatttaattgagcttaagtacttaaaaaaaatggtaatcaatttggcaaaatattataattaattgttcttactgtaatcttacaaattacgtgctgcttaagcaactaaacatcagtaaagtaatcaatttgtttgggtatttgttgtagctctaattgctaactttacttacagaaatgggctgccctaataagtggctcactgttatgggctatatttttgtttctgggtacatatgggctgtctaatttttgtatttacaggatgtaccaatcctatgaccagaaaagagaaagaaggaaaagaaaatagtggaaataaaaaatatcaattattttaatgtatggaaatttttacaaaaaataaaatgaattatgtagtatatgatacgcagagcattgagcatgcgctatgaaattttcaactagtatggatattttaacgatttacaaaagtctcaagatggtttaaattttcaatctttttgcccataaaaatctcaattaattaactagattgagccatctcttagaaccctttcagttggcttttcgtcttttttaaaattttacgaatacaaaatttatcacataattctcattgttacgtgtaggagaatgttaattaaaacactagtaaaaaaagtaaaagtgaaaaattgttattaaaagtaataaattgaagattattaacatatttatgcattaagttttaataatgcttttattttttttaaattttttaattaatatctttaaactactcgtgaacggttcctaaattttatcaaagataacaaagaagaagcaagacaacaagcaaggtgtttcttttttttatatatcaattggaatcgattcagtgaatcagtctaaaacaaaaggataagtgtgacgaagtaccacaaacactagtttgtctgcttttgccaactctcacccaagtagctaccttctttgtctgattgataaaggagagggacgtgccaatgaaatcaatcgtatcgaactaaaatttggtgcaatcaattcaatgcattactagctatttcggaaacgcatattttgtaaaagagctcgaaaacaatgaagggaaatatgttaagagaagagataaagtttggttgatggtggttaccactttgagggatgatggctcacttgccacaaactttcgcatcaaacacatgggcgacaccttgatttttaaccattttgttcaaacatcataggctttggtgagtgccagataacggaggcaagtttttaaatatataaaacagttcaaaagtatgaattttatgttataatgcgtcatctcatttatttaatgagtttttttggtaatttatttatttatttaataagtttgaaaatacataagatgtcaatttaatttattaaagtctaaatcatattttttatccgtaaaaatcataaaaattaattatcaaaagatttacaataattcacacatcaaatttaacaaactaaggtaattaaactccattgacaaagcataaaacatatattagatgattgtgcataactttatttattattaatgaattttattttattttatttctaaaactaaatattttgtcagatatctatccctgaagttgatatgagctagggggaaataggcatagtgctttaattgccgtttgtcaaatgaaaagtatagagtcaaaatctggatataaccaagttgactttatcttgcaggaagcaagtggagttgtataagttgcatatcagcaatagcatggagaaatgaaaaagatagatagtgnnnnnnnnnnnnnnnnnnnnnnnnnnnnnnnnnnnnnnnnnnnnnnnnnnnnnnnnnnnnnnnnnnnnnnnnnnnnnnnnnnnnnnnnnnnnnnnnnnnnnnnnnnnnnnnnnnnnnnnnnnnnnnnnnnnnnnnnnnnnnnnnnnnnnnnnnnnnnnnnnnnnnnnnnnnnnnnnnnnnnnnnnnnnnnnnnnnnnnnnnnnnnnnnnnnnnnnnnnnnnnnnnnnnnnnnnnnnnnnnnnnnnnnnnnnnnnnnnnnnnnnnnnnnnnnnnnnnnnnnnnnnnnnnnnnnnnnnnnnnnnnnnnnnnnnnnnnnnnnnnnnnnnnnnnnnnnnnnnnnnnnnnnnnnnnnnnnnnnnnnnnnnnnnnnnnnnnnnnnnnnnnnnnnnnnnnnnnnnnnnnnnnnnnnnnnnnnnnnnnnnnnnnnnnnnnnnnnnnnnnnnnnnnnnnnnnnnnnnnnnnnnnnnnnnnnnnnnnnnnnnnnnnnnnnnnnnnnnnnnnnnnnnnnnnnnnnnnnnnnnnnnnnnnnnnnnnnnnnnnnnnnnnnnnnnnnnnnnnnnnnnnnnnnnnnnnnnnnnnnnnnnnnnnnnnnnnnnnnnnnnnnnnnnnnnnnnnnnnnnnnnnnnnnnnnnnnnnnnnnnnnnnnnnnnnnnnnnnnnnnnnnnnnnnnnnnnnnnnnnnnnnnnnnnnnnnnnnnnnnnnnnnnnnnnnnnnnnnnnnnnnnnnnnnnnnnnnnnnnnnnnnnnnnnnnnnnnnnnnnnnnnnnnnnnnnnnnnnnnnnnnnnnnnnnnnnnnnnnnnnnnnnnnnnnnnnnnnnnnnnnnnnnnnnnnnnnnnnnnnnnnnnnnnnnnnnnnnnnnnnnnnnnnnnnnnnnnnnnnnnnnnnnnnnnnnnnnnnnnnnnnnnnnnnnnnnnnnnnnnnnnnnnnnnnnnnnnnnnnnnnnnnnnnnnnnnnnnnnnnnnnnnnnnnnnnnnnnnnnnnnnnnnnnnnnnnnnnnnnnnnnnnnnnnnnnnnnnnnnnnnnnnnnnnnnnnnnnnnnnnnnnnnnnnnnnnnnnnnnnnnnnnnnnnnnnnnnnnnnnnnnnnnnnnnnnnnnnnnnnnnnnnnnnnnnnnnnnnnnnnnnnnnnnnnnnnnnnnnnnnnnnnnnnnnnnnnnnnnnnnnnnnnnnnnnnnnnnnnnnnnnnnnnnnnnnnnnnnnnnnnnnnnnnnnnnnnnnnnnnnnnnnnnnnnnnnnnnnnnnnnnnnnnnnnnnnnnnnnnnnnnnnnnnnnnnnnnnnnnnnnnnnnnnnnnnnnnnnnnnnnnnnnnnnnnnnnnnnnnnnnnnnnnnnnnnnnnnnnnnnnnnnnnnnnnnnnnnnnnnnnnnnnnnnnnnnnnnnnnnnnnnnnnnnnnnnnnnnnnnnnnnnnnnnnnnnnnnnnnnnnnnnnnnnnnnnnnnnnnnnnnnnnnnnnnnnnnnnnnnnnnnnnnnnnnnnnnnnnnnnnnnnnnnnnnnnnnnnnnnnnnnnnnnnnnnnnnnnnnnnnnnnnnnnnnnnnnnnnnnnnnnnnnnnnnnnnnnnnnnnnnnnnnnnnnnnnnnnnnnnnnnnnnnnnnnnnnnnnnnnnnnnnnnnnnnnnnnnnnnnnnnnnnnnnnnnnnnnnnnnnnnnnnnnnnnnnnnnnnnnnnnnnnnnnnnnnnnnnnnnnnnnnnnnnnnnnnnnnnnnnnnnnnnnnnnnnnnnnnnntctgttctttttttttctttatattttcttaatttgttattcatatgcatttttttttatcattattgtattatttcttgcacaacttatgaggaaagtattgtgtagccaagtttaaataaatatgttataactcaagttatggtaatacgtatgttttaatttatatagaattgttagaatataaaatattcaagtattgatacaaagtcactcgtataataacatattgatagttcatacgagtatgacatcgataagtaatcaattttgaaatatggattactactagaaaataagcttttaaattggttgtttttgactttcaacatagatgttaacatcagttttcaaaaagtgatgttaagatacactatgcaacattaatttttaagaaaatcgatgttgtataataagaaataaataaaaaaatgtaaaatatacaaaaatcaatttcggtatttaaaaaaacaatgttatgatacacttgacaatatcgattttcttaaaaatcgatattgtgttgcacacgacaacattgattttcaggaaaattgatgttgttaagtttaccacaacattggttctctaaataatcgatgtggaaaaccactttctatatcagttctgccaaaaccaatgttgaatagtacttacaacatcaattttgttgaatagtacttataaaaacgatgtggaaaatgattggtcttgtcggtctttgcgaacttggagaagagaaagagtgaacaaagaaataggggagcacaaagtagcaaagagtgagcgcgatgttattataaaaacatccagtcgcttgagttttaatttagtaaaaatccaacatcggttgttaaaaaaccaatgttaacaaaaatcaattaacattgattttttataaaactggtgttaacattgctatgttaatatcaattttttaataactgatgttaatattgtcacgttaacatcgatttttgaaaaatctacgttaatattactacattaacatcgatttttgaaaaatcgatattaagagcgtcacgttaacatcgatttttttaaaaaccaatgttaacaaaaccaatttatttataaaaaaaatgtcaccgcccttttgttaacatcgattttatcaaaaaaattgatattaaagtaagaatattgaaagcattctttctagtgcatgcatcagattcaatctacaaagtggacattcatacatattactaacttacttaagacaaatattacaattttgaaaatttagaaaatagtttaatcttaaaataaaatttaaaaaattgcaaactacaattaacgaagcaaaaaattcaaaggaagaggcaggtttatacatggagtaatgtgatttacacatcaatttttttacaataaatacacaagataaagagagatgagaagtgaaaaacaaagtgtgtatatatatatgttagatatataatatgaccttgagaaataacaaaaaaaataacacttccttattatttaagatttaagagagagaaagagatacaagaaataaaattattataagaataataagtaataaatcctccgcaaaacaaaacaacaaaaagtagtattaatatcctagtaagcaataacacactctttatcaaaacatactaatcttgtgattggtgttctttaatgaatgaataagacacacgtaaaattcagtttattaattaatattaatgagtgcatatcatgaaccacacaagacaaggcaagacacacaaataagaacaaacgaatgaagaatatgcggggctcaccattccgtacctatcatgtggtcaggttctcttcatctccatttccatttccatttccttctccttctttctttcctcttcaacatgtcttaataaaattcccactcatactcttctttccaacacaaccaaataatctcttgcaccttaattctatcgcatactctgcctcttcattgcataggcacgtgaacggccatgtcaatgaattcccacgtaaaattcatgaaattccccacgttctgactaaggttttgaagtgtgtttgaagacaacactgcactgcactagtgttacacacatatatagacaacaacacaaaagaaactttgtgtgtgtgtgtgtgtgtatatatatatatatattctaatggctggcaatgaatggattaatgggtaccttgaggctatactatccactggaactggggctggcaccgttgatgagcaaatgcaaaaagcagtggctccaccagaaagtgcacattttaatcccacaaagtactttgtggaagaagtggtgtccagtgttgacgagtctgaccttcaccgtacatggatcaaggtggttgccactcgtaacaccagggaacgcagctcaaggttggagaacatgtgctggcgaatttggcatcttgcccgcaagaagaaacaggtaacaatcacatttcatttagtgctaattgcctaaggttcgaaccctgcagggagagttgtttacatttagtgtctgacaatacttcaaacaacaaacaagattggttctgaagaagaatacttgttaggaatgaagaaaaaaataacactaaacatgacaataacacttgatttgaaagtagaattgatagtaatatatatgtacatgtgcacctaagttttttaatgtttctttgtttgattttgttgaatgctatgcaatagaatctcgagtggccaagcaaaatgttgtttggtttaaattgtaaattttcatttttgttgtatttgctttttcattcgatgaatttgggggaagtatatatacatatatatatatatatatatatatatatatatatataccagagtgattgtgagtgaaattaatggggcactacttgtagttggaaggggaggagctgcagagattagcaaacagaagatgggagagagaacaaggacgcagggatgcaacagaggacctgtctgaagagttgtcagaaggggaaaaaggagatggcgttggggagatgatacaaattgagacatcaaagaaaaatttccagaggcagatttccaacttggaagtatggtctgatgacaaaaaggaaaagaaactttacattgtcctcttaaggtatattaattcttcacttcctcacaatcattttgcattcaataaatatgtttagccaaatttcttgattgtgttttactaaggtatattgattgtttgactatgacccttgtcatttgacagtttgcatggtttggtgcgaggagaaaacatggagcttggtcgagattctgatactggtggacaggtattacacattgctacatgaataagctgtgacccttccatttagtgtgtgttttgatgccagttggtgagagaaattattagatggtctgagatgatcatggtcctattaatctttacgtatatgacaagtaatgaactgttattaattctttttcataaatgaaaaaattcgagtacatgtcacatagattagtcaaaactatggataggtgatagttctaaattatctaataatttgtcggttgaagtagcttaaaaatacttatactctcaaaacaatcaatcttccttctcattttttgtcttggaattcaagaatatgaattggaattcccaaaaacatattcccaacttttatcaaacatagccttaattggtgttcaacaatgattcaatttcaaccaatgtattttttccagattaaatatgtggtagaacttgctcgtgcactagcaaaaatgccaggagtgtatagagtagacctcttcacacgccaaatctcatctcctgaaattgattggagctacggagaacctacagaaatgctaagtgcaggcacagatgaggatgatgataacattggggagagcagtggtgcatatatcataagaataccctttggtccacgtgaaaaatatctacagaaagaacttctttggccctatattcaggaatttgtagatggggctttagctcacattctcaatatgtcaaaagtattgggtgaacaagttagtggggggcaacctgtgtggccatacgttattcatggacattatgccgatgctggagatagtgctgctcttctttcaggtgccttgaatgtgccaatggtgctcactggccattcactaggaagaaacaagctagaacagcttcttaagcaagggcgtcaatcgaaggaggatatcaactcaacatataagataatgaggagaatagaagcagaagagctttccctagatgctgctgaacttgttatcactagcacaaggcaagaaattgatgagcaatggggactttatgatgggtttgatgtcaagcttgagaaagttttgcgagctcgagttagacgtggtgtcaattgtcatggccgattcatgccaaggatggcggtaagaatgcaactagggtcacacacacactcaatgtttgaaagtcttttatttcttaaaccttggtgatacttctttggaaaaggaaacaactatgtaccaactttttcaagggatggttatatcagttactttatttggtgttttcttatgcaccttagcatgtcttaaattctcaaatttaagataacgtgttgtatgaagtactaatggttcaaacttatgtaggttatcccgcctggtatggactttagcaatgttgtgacacaagaagatggccctgaagttgatggggagctcacacagcttactcgtggtgttgatgagtcttcaccaaaggctttacctacaatctggttagaagtgagtaactaacatgtctacatatcttggattacattgagttcttcataaatacttataggagaagaaaataagaaggtaaaatgaattaaacttctcctataagttaaaatcacttatgtattttaacttttttattgaagttttcttatgaaagaaatttgattcattttgcttattgttttcttccttagttcctttataattatccagagtcaatgactagccttgtcaagttgtaactgataactttgtgcaggtgatgcgtttcttcacaaatcctcataaacctatgatcttagccttgtcaaggccagatccgaaaaagaacataaccactttgttaaaagcctttggagaatgccgtcccttaagagaattagctaatcttgtaagttgacataattcaactgctcaatacttggtggaaacaatggttgagaacttgtaaaaaggactaatatgttttcaaacagacgcttataatgggaaacagggatgacatagatgaaatgtcctctggcaatgctagtgtgctcacaacagtgttgaaattgattgataagtatgacctgtacgggcaagtggcatacccaaaacatcacaaccaatctgatgttccagagatatacagatttgctgcaaaaacaaaggtataaaatttattgaagttttagtatatgttgagatctaacttcttatgtgataacaatgatggccagctaactagtttgaaatttctctcagggtgttttcataaatccggctttagtggaaccctttggccttactttaattgaggcaggtttttaactaactagccacttttgtaatattattcttattttgatgttgaagtgattattgaatgtgcttaaactcatgcaggcagctgcccatggacttccaatggtggccactaaaaatgggggacctgtggacattcatcgggtaatttaagaattaagtttagatagtcagttgcatgatccatgctaggaagttcatgaattatttgtcaaatggcatcaaagcattggaaaaaaatttgtaaaccaagattttaattcccactaggagagttactcacatttagtatctgacacggcctcaaatatgattgtctccgaaggaggaaaccaaaaaaaaatgcagtatgtagtgatttggatattaattgtacatcccatatttgctttttcttgttttatttattttggaaatcaaacaggatgaacacctaattaggtctagctccttttgaattgtgatgttaggccctgaacaatggtttgcttgtggatcctcatgatgacatagcaattgctgatgcattggtgaagttgttgtcagagaaaaacatgtggcatgagtgcaggaagaacggttggaagaacatacaccttttctcatggcctgaacactgtcgcacttacttgacccgggcggctgcctgtcggatgaggcatccacaatggcaaaccaacaatccagaggatgataaagctgttgaagaagaagagtctttcaacgattcgctcaaggacgaacacgacatgtcccttaggctctcaattgatggtgacttgactgcagcaagtggaggcactggtctagatatgcaagaccaagttaaacgcatcctaagcaagataaggaagacagattctggctcaaatggtaatggtggtggaaatgtcaatatgctgcttgacaatgtaactagcactagcactaacactagcaaatatcctctattgaggagaaggcgtaggttgattgttatagcacttgatttgtatgacaataatggagctccagagaagaacatgattgagatagtgcaaaagataattaaagctgtgcaattagaccctcaaactgctagagttacagggattgctttatcaactgctatgccagtgatagaagcagtagagttccttacatcaggcaatgttcaagtgaatgagtttgatgctttaatttgcagtagtggaagtcaagtttactaccctggcatcaatacagaagaaggaaagcttttgcctgatccagattatgaggtacatattgactatcgttgggggtgtgaaggtcttaagaaaaccatttggaaacttatgaatggtgatgagaacagccccattgaggaagatctgaaatccagcaatgcacattgcatctcatacaaaataaaggatcttagtaaggtataaatcaacatgacatttaccattatattaagttacataatggctagctggaggcactaagagataaatgataatcatgtgtattaaattcaggcaaaaaaagttgatgagttgaggcagaagcttaggatgcgaggtctacgttgtcatcctatgtactgcagggggtcatcaagaatgcatttaattcctcttcttgcatctagagcccaggcactcaggtaattaacacttcatccttaatttctaactaattttttcaatcaattcataatataaaacaagtaatattgagtacatgattgatttcacgttgagtcatccaaaatcacattaaaatagtatcaattaacatgcattttaagtaaatgctcatgtgttcaatttcacgttgaagaatttatagcatgttatgatctagttggtttaaaagttgcatcaatttcaaacacacttaacataaaaagctaaaatagataggttccaaatatcatgggcatgttctttgtgcgagttttctctcgaggaatgtcaaatcaaacgcaaaatgattctacggctagaaccgattttagttaaaagtaatcttatttcgaaattttatacaaaattttattgctttgttttaagaataaaaacacccaaacttaaatatacgacttcaaaatcaattatatttagaatcaatttaatttgaaatcaatttttcaaacgttagcctaatcacaaactgaatgtttattatttgcttaaatatgttaattaggtatctctttgtacgttggagattgaacgttgcaaacatgtacgtcatccttggagaaaccggggacacggattatgaggagatgatttctggaactcacaagaccataatcatgaagggagtgatttctaagggttcagaagagttactaagaggtccaggaagctaccaaagagatgatattgtcccaaatgagagccctcttgttgcatccattactgaaacaacacatgaaaacattgctaatgctttgaagcaactttccaaatctggaggaatctgaagtgctacgtactatatattaagtgcattttctttgctctctcttctcaaaacaagtaataaatttatgagagtggtatatgaatatcttcacatatgtggccactttaatatattacacacttcatcaatatctattatttttctgtattttttttttattcttatcgtatcatttcacttattatatatactcatatttatatttatttttttctctttttctctctaggtgttaaccagaagattggtccaccaatcttttcctaaatttatttaccaccacagtcaaaaagaaaaaatgaattgatgtaaatgatctgttacctaatgcatatattaaatgtggctaaagtgtagctagatcatgcttttctttgttacaaattgtttttcttgatagagcttcaagaagttatatataatttctctaaaatacgaataaattgaactcgaaatttttgtgcaatcacccgagaattgagatagataaattttactaaaatagtttcattagcacccaaagtattataagacaaaacccgccaattgtagcagcatccgttaaaatttgtccctttttatatatttacctcggtgttatgtgtgtttgagaaaacagtgaaatttatgtaatgagactttcctacttaatgaactgaatttttggtgattagagttcactccgtaagcctaatgtaataatgtgaagtatatatatatttttacatttggagatcaaatagaaacttgatgtaaatttgagagatattaaaatacttaattttaaaaaaatattatttaattaatttaatgtgtatattgttgacgtggatgtcattaagtagctacatcaacaatgcgtttaatatatgctattatctaagagggatgaaaaaatattttgcaaaattggagaattnnnnnnnnnnnnnnnnnnnnnnnnnnnnnnnnnnnnnnnnnnnnnnnnnnnnnnnnnnnnnnnnnnnnnnnnnnnnnnnnnnnnnnnnnnnnnnnnnnnnnnnnnnnnnnnnnnnnnnnnnnnnnnnnnnnnnnnnnnnnnnnnnnnnnnnnnnnnnnnnnnnnnnnnnnnnnnnnnnnnnnnnnnnnnnnnnnnnnnnnnnnnnnnnnnnnnnnnnnnnnnnnnnnnnnnnnnnnnnnnnnnnnnnnnnnnnnnnnnnnnnnnnnnnnnnnnnnnnnnnnnnnnnnnnnnnnnnnnnnnnnnnnnnnnnnnnnnnnnnnnnnnnnnnnnnnnnnnnnnnnnnnnnnnnnnnnnnnnnnnnnnnnnnnnnnnnnnnnnnnnnnnnnnnnnnnnnnnnnnnnnnnnnnnnnnnnnnnnnnnnnnnnnnnnnnnnnnnnnnnnnnnnnnnnnnnnnnnnnnnnnnnnnnnnnnnnnnnnnnnnnnnnnnnnnnnnnnnnnnnnnnnnnnnnnnnnnnnnnnnnnnnnnnnnnnnnnnnnnnnnnnnnnnnnnnnnnnnnnnnnnnnnnnnnnnnnnnnnnnnnnnnnnnnnnnnnnnnnnnnnnnnnnnnnnnnnnnnnnnnnnnnnnnnnnnnnnnnnnnnnnnnnnnnnnnnnnnnnnnnnnnnnnnnnnnnnnnnnnnnnnnnnnnnnnnnnnnnnnnnnnnnnnnnnnnnnnnnnnnnnnnnnnntagaaaattcacaaatgttgctttcaaaaaaataatagtattgttagaattcaaattataacaatatattgatatattacatgtttggcccacaattaaactaattgaataatatatcttttcaattcacattgttaattataaaacctcatcattcccgctatcacagggggaaataattacttttatctttgtgaaattataatatttgattaaattgctactttatacatttggatattttatatttgttgactatatatttttatattaataaaaaaatgttgttccctatgaatttagacttgatgaagttattattgaaatactaaatccgtatatgcaagagttgagtacaccggaaaaaaaaatgcaagagttgaaccatatatataaaataatatctttcaaatgtggataaaaaagaataccttgacaatagtttgagccaatagtaattttaagctcatataataatagataataataaatagtgattctaatagtaattattttaaaaaaagtgaggaaaagtgcaaaggttttgtccggattatctttaataaaaaattatgcttcgaatcaaagtatctatttcttcctccattggtggctttttgtggccctctaaacccatactcagaaaatgcacagtttttaactcaagctttcgattttctctcaggaaaggtctgaagatcaagcttagtcaaaacgtattgacaaaattacctctctcactatagtcacccgaattttatatcatgcggggcatagttaaacatcaaggcatgccattatctattaagggcaaaaaaacataccattcagcaagttatattcgcctaatatatgtattttcaataagttggcaactaaaagcttctgactttcacacatttaatctaatctgaaagggaaatttagccattactggtagagaattaatttcttataataataataataataaattatatatgctattggttggtttacaactttacataaaaaaagttttttttttttcttaaataaagtggatgatctttattttcttaaccatacttgactaaatttgagttgattaagaaataatgcaattttattacttcacttttttccctccaccatgtttttgtgtttatatttgctggttttttccgcataattttaaaaaatgttatttcttactagatattcaaatgttgtaatttttccctctctctcaataatatgaaataattagtctaggattgaacatatcaagctctactaggaacaatatttttttttatatgtgttacatatagaataattcattcaataatttatacagtattaaaaatacaattttctttgaataatgatattttatttaatttaaaaattaatttctaagattctttttattattattttgattttaagattttctttccatcttggttttctatgatccgttcaaaacatagagttaattttgggatgttcaaaaaccaaaacccgaagcaaattgaaatggcatgtgaggggaagcatagtagcatggtgccaagtttcaagatttgcataagatttttccctttcacacaaataggatagtttggtgaacagacatgacatcagaggaagcctagatttggtgctcagctcgtctgttggattgaggttgactctctctcccctctctctcttcactttacctttcttccttactcattacaattttccattttttctttctttctttctttctaccagccatccataaacaccgtacatacctattcatttcacatttgctttccctttactgtttctctctctctctctctcgctctctctgtctctgctttccttcattgcaaaccaagcttcctttccagcttggtctggtcctgccctcagacacaacacaatacccaccaaccatttttaccacatttactctttctcttctctaattagtaaaatacaaccattctctctctgcctctttattttcccatcaaaataagatttttgtctggcattcccttccattttcttatattaatattttttacattttatttttttgtttaagtgtggcccacttgttacctactgttgtgccactacatcttttgcagcatctggattttgctgtagggtatgtgtgttgctcatcctcaggtattctttgcacattaagtctcttgtcggttcaaaatgaggtgtgaaacctgttgcttctttgggtagaggattcaggagtctagctaccttggatcaccacaaaggtaaatgctttgtctttctcaatcactttttggataatatacattttactttctcttttgtttgcttggatcataagtgatgctttcctggtttcctttctttttttcattagaaattgttgtgcttatcaacatgcatcaggttattttactttcccaaatgaactgtgaattcattcatcatgcctttttgattgtgttggttttgaaactgctgaattatatatgctacttcttgtattaattggattatgttttattgtatgccattgccaataaagcctgagatgggagtctttcatcttcaaatttagcttacaggaaattttgtagtctgagattaccttaaattatgattaagatgcaattagtgatttgttaaactcttgctttggttgttgtttatggcattgttgcaagaactgaaatgttggctgtaaattagtatgttcagatgtgtgtttcgaagtcttgagtaaggggagtacttaacttgaatcctgtacttgagtgggaatgtcttggttctaccagctgaagaacttgtggggacgatattgattgactcggtgcaaccaattatgtcatccaacagttctttgaatatggaattgtcaaagaagacgtcatttttgggtttgaaacgatgggttttgattgggataggtgtcggtgcatttatagtgctgattttgtgtatattatcgatatgggcaatgtttcggagaaagtctaggagatctctggacaagtattctgtatcccaaataccaaatttctcaaaagatatcgatgttgacaaggttggggtgcagagttctcatgttcaaccagaaaatgtggttattcctgttcatgacaaggcaagtgacaacaattcagataatgtatcagtttgtttgggaaatagcaaatctggtgatcctgataatatcagtcagtgcagctcaatttatcatcatgagagaggattgagttcaatgtcagccgaagaaggaagctctgggaatgttaagaagcaatctacgttgtcacatggagggctggtcactgcctctcctttagttggcttgccagaattttctcatcttgggtggggccactggtttacacttagagatctggaaatggcaaccaatcgtttctcaagtgagaacatcattggggagggtggatatgggattgtttacaggggcagactgattaatggaactgaggtggcagtgaagaagcttcttaacaacctgtaaggatatttatttatcattggtgtaccctttaattttttttcttctgccactttctgacactacacataaacaatgacttctttttaatcttgttatgtaattgagttctgcattgaattcctaggggccaagctgagaaagaattcagggttgaagtggaggctataggccatgttagacataagcatcttgtacgccttcttggatattgtgtagaaggagttcataggtaaaaaaaaaaatctttgttttcctacattagtatccactacactttgtattatatttcacaaattcattctcaataatagtgccagctttgggtttatgatagtcatattctacttagtccaaaataggacataagcttttctctatgttatgtctctttatctgtcataatgaatgtgcttcctgattgatattcaggctgcttgtgtatgaatatgtgaacaatggtaacttagaacaatggttacatggagacatgcaccaatatgggacacttacctgggaggcccgcatgaaagttatacttggcactgccaaagcgtaagttcagggtgcaacttaaaatatataccatggtaatcatttgtatagtctggtgccaaatcactcggtataattatcttaaatctctcatctctgaattttgattgtaaaaatgtgttcctttaattaatgttattactattagtgttttatgcgtgtcaaaatatatcataaatattattaaatgtatttatgtttcttgataatattatgttatagactttatattctcatatagtttgcagtatatttaagcccattaggtttctagtctaaacaacaatatgcactctgcccatgggaccactgactatcttaggccatatttggatttaaattactaacaatgggtggaatgtgatggaatgaaataaatttaccgttgcattgttttaatattttatgatggaatggaattgaattagaaaaactggttacacccagtacccccaaattggggggaagaaaaggagcagttttgggtggaatggaatggattccatttcatttcactccattagttcaaacatagtcttagtgaacatgtgacctattgtagtttaaatattttacttcttaattagttacaaaattatttttatggaagattcaatgatggaccttgttctcccgattaaccctctattgtactgtgactggtggcaggcttgcttatttacatgaagcaatagaaccaaaagttattcaccgggatataaagtctagcaacatattgattgatgatgaattcaatgcaaaggtttctgattttggtttggccaaacttttggattcaggcgaaagtcacataaccactagagtaatgggaacgtttgggtatacagaaaatttattatctctttccttatttttttacttaaaggatttgtacacttaggaactcacttttgttttggatttcagttatgtggcgccagaatatgctaacagtggtttgttaaatgagaagagtgacatttacagctttggtgtcctcttgctggaagcagccactggaagggaccctgtagactatgcgcgtcctgctaatgaggtggctaatttttatgaactctgcctgcttgccagttctaaccatgctttccaccgtaagtgatcactgcccttcaaatagctgatgagatattgtttatcttcattatgacaggttaatctagttgaatggctcaaaacgatggtggggacacggagagctgaagaagtagtggactcaagccttgaagttaaaccaccactgcgtgctttgaagcgcactcttttggttgcacttaggtgcatagatcctgatgctgaaaagaggcccaaaatgagtcaagttgtgaggatgcttgaagctgacgaatatccacttcgagaggttcccttcaatatcttgtcttctcatacataagttctactgattagttaataactttgatcttgagtcttatatcacaattttgcatattttttaccttgtgtgcattcttatcattattctccttcgtacatgtattggctaacctaccaggctaccaccaactagaaagaacaaaatattggatgaactcaggaaaaaaattgggggtaaaatatgtttctgtttcctacaaataataattgttggttttagtcctcataagtcataatatggcataaaggtcacattaatgaacattctaagatggcatgtgacatgacatatttagatgcatgttaagtcatcaataaatcaataaatggtgatagagactattttcaaaacttttaacataaaaactaaaactaatatttttttttcaagaactacaaccaaaagtcgccatattaaacccaaaaatttgatattcttcaggctacacaatttctatttacttaattaccaccacctcagtatagctcaaaaacaaacagacaaacaaagcataatgttttgtgtttatcgtaacatattagtgggagtatgctgtttaattctgcctacttagcattctgatgcattatattataaagagcatggtcctcttttgtatgcatgtttttgggtgcttatatactaaatattgaagtattatatcttgacaacaaaacactaaaacgtaagctagacaactgattgataataatcactttcaggatagaaggaaaagaaagagtggcactgccagcatggaaattgaaaccgtgaaggatatttctggtccatctgatgctcaaaagatgggaatttctgaaagccacgttgaaggataggattgacaaccccatgacttagcctgcatgtacaattcccgttatacacgttatatatagtaacttatctataccatattgaaatatctccaactttgtgaccttaagaaaattttgtttcatctgaggatagaatcagatcaaagtgagcccgtttggataatgaaggttttgttttgttttgtttttgtttttaattgaatggttgccaatgaagatatgatacactagctagccttgcaaagagggtagaatcagtatgggtgctgtgagtgttagtgttttacagatgctacggggcctatcttcttacatgattgttgattttctttcttaacttccttgactttattatatcctcacatagtcactcgctgctggagagtggcgatagtaaaaacgaatacttggcttcaatttccatgtcaagtgacaatatatttttcaagcatcttaaatgggagttccttatgagattcttagacttaagaatcagtttttatacaatttcaccattagagtcaataattgtgattttgtatatggataattcatctatatcttgttcgttctaacaatattttccttttgaaagggtaaataaacgttgtttttttagagagatatttttagtgttttactaatctagtttaaggtatttaacatattgatacctaatgatttttagcaaagtggtgaaaatgtagaactcatgcaagaattttgttttttttttttttaaaaaaaaaattgtaacattaaaagaataatttcnnnnnnnnnnnnnnnnnnnnnnnnnnnnnnnnnnnnnnnnnnnnnnnnnnnnnnnnnnnnnnnnnnnnnnnnnnnnnnnnnnnnnnnnnnnnnnnnnnnnnnnnnnnnnnnnnnnnnnnnnnnnnnnnnnnnnnnnnnnnnnnnnnnnnnnnnnnnnnnnnnnnnnnnnnnnnnnnnnnnnnnnnnnnnnnnnnnnnnnnnnnnnnnnnnnnnnnnnnnnnnnnnnnnnnnnnnnnnnntattaaaataatataaacatatgaaataacttgtgagatttgttttaagtttttaaagttttagtgtgttagtatatccgttaagttcaacataatgccaatccaaggcctaattgtgtaaaaggtctgttggacagcagtgtaagtgtgtaacaactttccaaacacagccttgcacattgaaaattttaaaacttatgtggtaatagggctgatataaattaagaagttaaatagcttgtggagatgttcttatgcagtattttggcttatttgtgttattttctcaacaattagattccttatcattactactgctgcttctctccccctccaaattattgggctttttacggttagatatagctaaggtttgtctctacagtcacttatgtgcttattatacgtgtagaagcaatgtccgtccccatggttcaaattccaacttgcacaaattatctgacaagaaatgggcattaatttttttcatttctaacagtatagttaattaagttttcatttcaagatggccagcaccgaatgatgcagtaccaataatttgtaaaagtggatgctttccttcacagcacattgttggttcatgcactaaaattgtgaatggctaatctagttatgattatcttttgattcttttcaacataatttttgttcctttccattgatgctagtgtcataaaggaatcttatctttcgcaaataaattaaattgtacaaacatttatgtggatcttagtgaaataatgagaagggaaaaacttttaaatttgcatgttatttcaatcctttgttgattctcttatttcacccaaacgaaaagagaatctaaacatgggagtttcttgaggaagcacttatttggcagacaggcaaacaaatgattcaagttgaaggcttcaaacggtggaagtggaatgcataattattcaatattctgataaagtagacctattttcacggactagaatctaggcttcttgaaactatctttctcttctgctacgtacccctttacaagctccatggggaatggggcaagttggcccatatttgccacatcttttgacttctccttccttcctttcataaacgggttgtttactgccattaatggctttttgaccataaagggctaaaaaaaatgagtaattaccatatgttaaaattatttattatttagaagtaagtcgtgtcaggtggtatgacttctaaatcaggactcatatcatctgtcacgacctttatattttttcatttttttaaagtgaagtcgtaactttatttataactttactgtgcatattttttttaggtttaaaaattgtaaatgtatttaagaatttaaaatcataaatatatttacgactttcaaactgtaattttttttttatttttacgctcaaaagtataaatatatatacgattttaaagtcgtacatatattcaggactttaaagtcgtacttttttttctcccttttgaacccgcacgactttaaagtcatgagcaatctcatgactttaaagtcgtctacattaaatattactaaatgcacctcttgtttttgataagtttctcactaaaaattgaaatttgctaattgcaccccgtttttattaagtatactccaatcttttattttaaatcttaaatttcaaatgctaatatttttaaaatatacccaaataattatgacgattgtgttaaaaaaattcataacaattatatttgtaaaaaatcattaacaaaatcaacatatttaattagtaaaatcaaaataaatatatgttatttcatattttacaagttaaaattattaccaaaatattttcatccaacaataaatctctaaaaatttaaattttaacattactacaaaaatttacaaaattaattaaaatattaaatgtaattcaaagtaattataacataaattattaaaatacttaataaaataacttaaaatatttacaaattattaaatcgtattacaaaaaataaaattacttgcatttttannnnnnnnnnnnnnnnnnnnnnnnnnnnnnnnnnnnnnnnnnnnnnnnnnnnnnnnnnnnnnnnnnnnnnnnnnnnnnnnnnnnnnnnnnnnnnnnnnnnnnnnnnnnnnnnnnnnnnnnnnnnnnnnnnnnnnnnnnnnnnnnnnnnnnnnnnnnnnnnnnnnnnnnnnnnnnnnnnnnnnnnnnnnnnnnnnnnnnnnnnnnnnnnnnnnnnnnnnnnnnnnnnnnnnnnnnnnnnnnnnnnnnnnnnnnnnnnnnnnnnnnnnnnnnnnnnnnnnnnnnnnnnnnnnnnnnnnnnnnnnnnnnnnnnnnnnnnnnnnnnnnnnnnnnnnnnnnnnnnnnnnnnnnnnnnnnnnnnnnnnnnnnnnnnnnnnnnnnnnnnnnnnnnnnnnnnnnnnnnnnnnnnnnnnnnnnnnnnnnnnnnnnnnnnnnnnnnnnnnnnnnnnnnnnnnnnnnnnnnnnnnnnnnnnnnnnnnnnnnnnnnnnnnnnnnnnnnnnnnnnnnnnnnnnnnnnnnnnnnnnnnnnnnnnnnnnnnnnnnnnnnnnnnnnnnnnnnnnnnnnnnnnnnnnnnnnnnnnnnnnnnnnnnnnnnnnnnnnnnnnnnnnnnnnnnnnnnnnnnnnnnnnnnnnnnnnnnnnnnnnnnnnnnnnnnnnnnnnnnnnnnnnnnnnnnnnnnnnnnnnnnnnnnnnnnnnnnnnnnnnnnnnnnnnnnnnnnnnnnnnnnnnnnnnnnnnnnnnnnnnnnnnnnnnnnnnnnnnnnnnnnnnnnnnnnnnnnnnnnnnnnnnnnnnnnnnnnnnnnnnnnnnnnnnnnnnnnnnnnnnnnnnnnnnnnnnnnnnnnnnnnnnnnnnnnnnnnnnnnnnnnnnnnnnnnnnnnnnnnnnnnnnnnnnnnnnnnnnnnnnnnnnnnnnnnnnnnnnnnnnnnnnnnnnnnnnnnnnnnnnnnnnnnnnnnnnnnnnnnnnnnnnnnnnnnnnnnnnnnnnnnnnnnnnnnnnnnnnnnnnnnnnnnnnnnnnnnnnnnnnnnnnnnnnnnnnnnnnnnnnnnnnnnnnnnnnnnnnnnnnnnnnnnnnnnnnnnnnnnnnnnnnnnnnnnnnnnnnnnnnnnnnnnaaaactattggtggagtccatagtcattaacttccactcactacatagaagatttgagtgaaaaacttgaggcaactattaatagatataaacaaaatgaaggtcatatataaaatgcaaaaaacttaaactacaatcctaactaccataactattttaaaaatattatctttttaaggtaataaaattcaaattatattattaaaaaatagaaacaggccacgtgtaagacaattgggtgtgttgaagtttaagctttcccttaattcgaattcaaaatatcaattaaaaagttttaagtttgttaacagtttgttacaaacaaaaacattaatcagaaagagtaccgaattctttatggtccaaatcaacgacagactcatttacgggtgaagtccaaatattgcaatatctcacaatcctttttatgagaaaaaaacatttctttgtattggaaaacacaaaacgctacttttttgccttaactttgataacaagctctttggtggactatggagtatggaagaggcacaaattctaaggacatatccaatagtgattcttagaaggaaatattaactttaagatatgatatttttaagatttattattggagttggcaattagatttttactggaaatctggttcttccacaagaatcatcaagatccgcactgtttcctaaaaaaaattgtcactttgctaagtagaaacccacatgaagcaattaccacgaatgggaaaaatcgaaggaaagggaatagaagagatgaacaacagaaagacagatttaggtttatgagcaccatatctgtctctacatgttgttgatgagaataaagatggtggtattacaagtaaagaaatctgagatttgaataattctgtttattcctcatgatcatagaatgtacagtgcctatgcttatatacccaaaaagagaatcattctagacgctaatttgttgtaactaactctcctatacaacctcacttataaaaggaatataggaataaaagctacatagcactacaccacaactgtgcaggaaagaggctttgtcaatatatctgccaattgattatgtgaattaaaattaatattacaagtaaagaaatatgagatttgaataattttgtttattactcatgatcatagagtgtacagtgcctatgcttatatacacaaaaagagaatcattctaaaagctaattttttatataacctcatgtataaaaagaataaaggaataaaagctacatagcactacaccactattgctataacaaaaagtaaaatacaattacaaaaatgtcctatgcttaataggtggtagcgaagggaagggaggagagtgtggggggtcgtatcggagggaggagcgggtgagggtttgttgtgtagcaaagggtacgggtggggttcgcgacgaagggaggtgaaggtgggggtttggagcggagggagcagatggtggtagtggggtttgtggagggagggtggggtggatggcgcaatagagggtgagggatggggaaggtgagagaaaacagaaagggaaagggtgaatggtggggaagcgtgagagagaaaagagaaagaggaaggggaatagtgtgggggcaccattgagaaggaaaatgggaagaaggacaaggtttggtattcaatttttcaaaggataaataataatttttgtctttaaatgtgtagagtgctaataaatttgtctctaaaagatggaaattcgttgttatgaaatttatattgtaaccatattaggtataggtagtgacaaaatcaagttgaatttcatttttttaatatttaacttaatgactatgcaatttttgtttgagtctcatattttagaaaagataatgttacattagaaattttagagcaatagacaaattatgcttattaattaatattatatttattattatgtttgttataacttatgtttgttttcctatttttttaaatgtttattataatgttatgtttgtaacaattaaaaaagggtaaaagatgaagattaaattatattttgagtaaatagtcatttttcaatccctgtatgtgtagagcattgaaaaatttatccttaaatgcgtcactaggatcttttattaactataatagacataagttaacatatgaataaatttgtcatattttttcactttcgaatactaaaatttgaattttcattttttgaatatgaatttgttctacacattcaatgacgaaaataactatttatcnnnnnnnnnnnnnnnnnnnnnnnnnnnnnnnnnnnnnnnnnnnnnnnnnnnnnnnnnnnnnnnnnnnnnnnnnnnnnnnnnnnnnnnnnnnnnnnnnnnnnnnnnnnnnnnnnnnnnnnnnnnnnnnnnnnnnnnnnnnnnnnnnnnnnnnnnnnnnnnnnnnnnnnnnnnnnnnnnnnnnnnnnnnnnnnnnnnnnnnnnnnnnnnnnnnnnnnnnnnnnnnnnnnnnnnnnnnnnnnnnnnnnnnnnnnnnnnnnnnnnnnnnnnnnnnnnnnnnnnnnnnnnnnnnnnnnnnnnnnnnnnnnnnnnnnnnnnnnnnnnnnnnnnnnnnnnnnnnnnnnnnnnnnnnnnnnnnnnnnnnnnnnnnnnnnnnnnnnnnnnnnnnnnnnnnnnnnnnnnnnnnnnnnnnnnnnnnnnnnnnnnnnnnnnnnnnnnnnnnnnnnnnnnnnnnnnnnnnnnnnnnnnnnnnnnnnnnnnnnnnnnnnnnnnnnnnnnnnnnnnnnnnnnnnnnnnnnnnnnnnnnnnnnnnnnnnnnnnnnnnnnnnnnnnnnnnnnnnnnnnnnnnnnnnnnnnnnnnnnnnnnnnnnnnnnnnnnnnnnnnnnnnnnnnnnnnnnnnnnnnnnnnnnnnnnnnnnnnnnnnnnnnnnnnnnnnnnnnnnnnnnnnnnnnnnnnnnnnnnnnnnnnnnnnnnnnnnnnnnnnnnnnnnnnnnnnnnnnnnnnnnnnnnnnnnnnnnnnnnnnnnnnnnnnnnnnnnnnnnnnnnnnnnnnnnnnnnnnnnnnnnnnnnnnnnnnnnnnnnnnnnnnnnnnnnnnnnnnnnnnnnnnnnnnnnnnnnnnnnnnnnnnnnnnnnnnnnnnnnnnnnnnnnnnnnnnnnnnnnnnnnnnnnnnnnnnntatcctcttaattactatatgctgacttaactaatttaattaattttttatttatctaataaaattttaaatttctctagagtaattagttttcatttaattaaaaaagtagttaaaaaaaagttcgtgcattgcactgataataaaactatcttcttttacaaaaactgaccctacagtcctcatgtcttcttcctcttttactctagctttccatctcgtgttcttcctcacaagctccagtgttcgatctccaacataatcaatcgtgtattcaacataacgtttatgttggccaacagtaaaaaaatacattttctttgtgtaagtgtaaaatgatatcttttagaaacacttaaatatgtttttgatttaattacgttattattttttaattttggtatttagaagttttttttttttttnnnnnnnnnnnnnnnnnnnnnnnnnnnnnnnnnnnnnnnnnnnnnnnnnnnnnnnnnnnnnnnnnnnnnnnnnnnnnnnnnnnnnnnnnnnnnnnnnnnnnnnnnnnnnnnnnnnnnnnnnnnnnnnnnnnnnnnnnnnnnnnnnnnnnnnnnnnnnnnnnnnnnnnnnnnnnnnnnnnnnnnnnnnnnnnnnnnnnnnnnnnnnnnnnnnnnnnnnnnnnnnnnaactttacaataattaaaaatgaacaatttttttacaaagactaaatttgaaaaagtaaaaacttacatagacaaaaaaatatttaaatttttaaaaattattaaatttcttttcttttcctactttcagacctaacaactttatcttatttttactcaattttccttctatttttctcaaataaaacaactataattttgttatactctatttattatctatttctcttttcttttattatttacttgtttatactccctctatttcctttctctctatcaaatataaccgttttttacataattttatatatttattacaagcatactactgagtatttggacttctaaaatagagtagtataaatctatgctagtttccatattaacgagtataattatttcaaatgttgttagaagagtatgtaacatgatcacaacaaaaaattgttcgtgtgatcatgtccagtatcaacatttgggtgtatacaatcactctataattctttcctttccctcacttctcattaagcaaattaattttctatacatgagtaaccagatgtttcttataaattagcttgtttggaccctagttctaacatggaattaaaaaatgtaaatccaccttctgctactcttacttttgctttaacaagttggcaatattcaagtcacgttgattatgcaattggaatgtgatggaaaattgccgttttaaggcattgctttgaggttggaacttgcaagtcagacaaaacaagtctatttcaataagcaatagccacaagcatgtcactttttcaaccacggaatcgattcaaatatcaaaagtggagggactttgctagattctctacttctcctactcttttgccagatagatgcaacactacttcttctgtctgcatgtctaattccacgtcaactgataattttgatcattttttttcaaggctaatgttatataccataacaaatagttttaatattttataaatgaaagtattaaataaaaaataactctatatatttaatgttttaaaaatattactattcactaatattatttcgttggtatgatgaaattagactagattcttagttaaccaagacattgattataaattttttgaatataaaaaatatgattggatatgaaacttcacttgagctgatcgattcaacatttatgacatgataaaaaatccaatgtacaaataagtaagaagatttagtaggaaaataatataatttactcgagggattaaaattttatttttacaatgaattaattttaaaattttcacaatcatttataaattttaaaaaactttaactgcattgtaaaatttacttggattttttaacatgttttgtattcataaaaagattaaaaataaaatcgtacatgagatactacttcaataatgaatttatttctacaaaataggataatttttactgtcccacattaatgaaacacttcccttattgtataaagatatatgccttgcatgtcactcaaacttttattgggcaacaactttgtttgtatccgtatgtgactatgtgtagacaaatgaaaagccggtgttgtaaacaagttggacaaggacaactggtgcatttatatagctagactatcttttcattttttggggacgggttaaaaggggttaattttacaaacaaattataaaactatatctcttttgaaatattttatcatattgtggtagaaaacactggaaaactctaataaaatgtcaaataatattttagaagaaatattgatttatcaatgctatgtacttatgtagtgtccatgtgagacactacaataccagtatcattgttactattattgcagtgtcttatgtaatattaataaatcggaaaagtatatgtgacattgtttgattaaaatagagttttttagtattgattgtctcaatttggtgaaatatttcaaattatttaatactttatttgtaaattaaccctggttaatccgccttcatttttcaatagctaggcatcttcaaagtgaactacaatttcaagttagtctctatatgttnnnnnnnnnnnnnnnnnnnnnnnnnnnnnnnnnnnnnnnnnnnnnnnnnnnnnnnnnnnnnnnnnnnnnnnnnnnnnnnnnnnnnnnnnnnnnnnnnnnnnnnnnnnnnnnnnnnnnnnnnnnnnnnnnnnnnnnnnnnnnnnnnnnnnnnnnnnnnnnnnnnnnnnnnnnnnnnnnnnnnnnnnnnnnnnnnnnnnnnnnnnnnnnnnnnnnnnnnnnnnnnnnnnnnnnnnnnnnnnnnnnnnnnnnnnnnnnnnnnnnnnnnnnnnnnnnnnnnnnnnnnnnnnnnnnnnnnnnnnnnnnnnnnnnnnnnnnnnnnnnnnnnnnnnnnnnnnnnnnnnnnnnnnnnnnnnnnnnnnnnnnnnnnnnnnnnnnnnnnnnnnnnnnnnnnnnnnnnnnnnnnnnnnnnnnnnnnnnnnnnnnnnnnnnnnnnnnnnnnnnnnnnnnnnnnnnnnnnnnnnnnnnnnnnnnnnnnnnnnnnnnnnnnnnnnnnnnnnnnnnnnnnnnnnnnnnnnnnnnnnnnnnnnnnnnnnnnnnnnnnnnnnnnnnnnnnnnnnnnnnnnnnnnnnnnnnnnnnnnnnnnnnnnnnnnnnnnnnnnnnnnnnnnnnnnnnnnnnnnnnnnnnnnnnnnnnnnnnnnnnnnnnnnnnnnnnnnnnnnnnnnnnnnnnnnnnnnnnnnnnnnnnnnnnnnnnnnnnnnnnnnnnnnnnnnnnnnnnnnnnnnnnnnnnnnnnnnnnnnnnnnnnnnnnnnnnnnnnnnnnnnnnnnnnnnnnnnnnnnnnnnnnnnnnnnnnnnnnnnnnnnnnnnnnnnnnnnnnnnnnnnnnnnnnnnnnnnnnnnnnnnnnnnnnnnnnnnnnnnnnnnnnnnnnnnnnnnnnnnnnnnnnnnnnnnnnnnnnnnnnnnnnnnnnnnnnnnnnnnnnnnnnnnnnnnnnnnnnnnnnnnnnnnnnnnnnnnnnnnnnnnnnnnnnnnnnnnnnnnnnnnnnnnnnnnnnnnnnnnnnnnnnnnnnnnnnnnnnnnnnnnnnnnnnnnnnnnnnnnnnnnnnnnnnnnnnnnnnnnnnnnnnnnnnnnnnnnnnnnnnnnnnnnnnnnnnnnnnnnnnnnnnnnnnnnnnnnnnnnnnnnnnnnnnnnnnnnnnnnnnnnnnnnnnnnnnnnnnnnnnnnnnnnnnnnnnnnnnnnnnnnnnnnnnnnnnnnnnnnnnnnnnnnnnnnnnnnnnnnnnnnnnnnnnnnnnnnnnnnnnnnnnnnnnnnnnnnnnnnnnnnnnnnnnnnnnnnnnnnnnnnnnnnnnnnnnnnnnnnnnnnnnnnnnnnnnnnnnnnnnnnnnnnnnnnnnnnnnnnnnnnnnnnnnnnnnnnnnnnnnnnnnnnnnnnnnnnnnnnnnnnnnnnnnnnnnnnnnnnnnnnnnnnnnnnnnnnnattcttaaaaaaatattgtgtataatattctatttaactcgaacaaaatttattctaataaaagatacatataatttatactaaaaaaatgaagatatattagaataaataattgatcttgattttttaaagtagcaaatattttgatgttgagatggtaattttgtgttgactaatcgttgataaatttaggataaactaaaagcacacgagactgacaaactgataaggattcaaattttgtcgcgagaaaggtgaagcttattaaaaagcttctatggcggcagagcaaacgataaatcaataatggaggcactcaatgattcattcatggaattaattaagacgctttggatatggtacaaagtttgttaattagttccgttaattatggtaaaccgaatttatagccataatgatttggacttctgcgatctacaaaagttgtgataatgtttaacgtgggaataaaaataaatcagttttttcactttttatttgtctcgtgatcatttagaatttcttttatggaatttttttcctcattttttcaaagttatcaattatcgaaatgaaattaacagtaaattatatcatttttttttatatttttaatgtttatatattaaaatgttttaaaccttggagcagccctcagctatagtcagccccgttagctccacctgctttgactttgtatgccatataacacccccagtgtgtcaaatttcaaatcaacattctattgtattttaagttttttttttttaatgttcagtactttaagatattacttattagtaaagaaattaatgtatttttaattaaaatacaatagaaattaataagttctcatgtatattaaatatatggataaaaaagggaactttgaaaattatagtgtaaagttttgtacaatataaaaaaaatactatatggttacactaaaagattgctttttgagattactattttaaattttacaataatataattatacataactaattaagaaatgatatatactattaaaaataaattccatatataaaaattacccataactttattgaagcgttgtaagcatcatcaagactttattgtcttgtcttttgaannnnnnnnnntttaatttttaagtagaaaataaataaataaactatgcccattataggcatatactagtatacatatataagttagaaccagtaaatgattttatggatatcacgtaccctagaacgtgcatttccattttccaaattccaaagcattatttttttcttataaaattctgaacttggatagctgtatggctagttggattatcattaattcatcgtaatcaattaaacaggatacaattaattgtgaaagtaattggtaaacgtcaaataattgtttaataatgaacatggaaaagttaagggtaactaaacctcattttatagtgtatgagatcagatgaaaagaagggaagagaagaaagagactgagaaacaatatgataaaaaaggaataaagaaatagataaaaaatgaagtagaaaaaagaaagttatattgcaaatgtcacagcattcaacagacattttaactacttatggttctttctaaaacctgacggcattaacttttaaacccatatggtctttgcaatatttattttagtccaatatatacataatttcaggcaatatatttcaatcacaaattcgagtttgtatctaaacatgacaacgggctaaacgaggatggacaggcatggccttcttaattaaccttcaatctcgactcttcaacatatctttatacgggttgaaatttattatttcatcctgtatttaataaaattatattaaaaatttgattttagaaaaaaaataaatttattgttacacatttatttttaactatttatatcaataaatttattgtaatacatttgtcaacaaaaatcgtcaacaaaagaatattaaattatgtaaaaattctaaaataaaattaacaagtaataaataaaattaagattaatacatttatcttccttgattctattgttttttaaggtaaacaaaatacaccaaatattaaataacataactcaaagtcatagacactaaccccatgttcattagttcaaattacaccaaattaaaaataattagaaaatgaaaacaatcttgatcatcaaaataaggaaaatttaaataaataatgtttttttaataaatattttgaaatttggaactgttttgaaactatttcgaaatttgggacagtcaaacatgtctaatttggacgtgtttcagttcgtcgctaatttggtcgctaagtcggtcgttaagacagaattagcgacggattttaaaaaacctcaatatcctttaaaaaagtgttagcgactaacttagcgatcgaattagcgacggactggaccacgtccaaattggacgtgtttgactatcccaaatttcgaaatagtttcaaaataaccccaaatatcaaaatatttattaaaaaagtattatttttaataatttgtctcaaaataaccaccaacttcaccaaagattccatcaacatttcttctggacccgatatttacaaaatcaaacatcatatatttagattttctttcaaatcttaaaattgaacatcacattagtaaataagtataattattaattcactaatcaataataatatctactaatcttgcaaatgttgaggaatgctactgaccaaagatccacatatattttaaattttttgaaaaattagataagaataatgatattaaagttttttagaacaactaaggattcattctcattagtaaaagttgattcttcaattgctctagaatctacaaataataaataacaatttataagttttaaaaatataaacaacgtgtgtgttgtaacttggaatctaaacaagtgaacagaaaattgaaaatcctaaataaagtaataaaagagaattttaataatttcatcatcaggacatatatgactaccggtgagtagtgacattctatttccaacctcgacctcaattaaaaagtcaaataatccccaaatccaaatttgtacccaatcaactcaagtatttctcataaaagtccaaataggttcaagccgatacccacgaatacgaattttattgccatgcctacttgtatcaaatttataggttggtcgtagatactcgtattagtataaagctcgtgaatcaatgataaaaaatataaagctcgtgaatcaagtttctttaaacatgaaaattaatccaatcgtattagttttggaattctaaaatgataatgctcctgaatattgaaagtttagagcataaattttgcaacaatgacaaaacaaacaaatcgagaaacaagattcgagaagatgcctgcaacatcaatttcttaatcaagaagaaaaattgtctcactttcttgcttttttttttcgttgtatatattttcttggtttatttgcgcttattttttaattattgtcttcgtattactttaattatcatatggctggcatggagggaagaggtacataccatttcgccatgttgataaagaaagagggttttaattagaatgtcatatttacacaataataagaatttgtatacttatctcaactctttttaaaaagtatattataaaaaaagccttaacatagagagtgttaatatagcctattaactgtgctagtttaggtttaagtttaagtaaaatttcgaaaaaattatccttttcagtgaatcatctgactaaattcaaataagttaaagtgaattatgaataatgaaagtctaaataaaaaaagacagtcttagtataacctcgaaagtacacatgcacacaagttaaaactacactacaacataaatacagagaaaattaatattttaaaaaggagccaaaaaaattataatttatctaattattatgatattatgatctatattggtataatatttttttaaaaaggaaaaaaaaaatatgtaaattacaatttcaaagtgttcatttatgaatatggcacggcatgaatattattttaaattgtctaaatttcttaagtataacaaagaattttcatgatatgtttggatttttaaaatatatgaataacaattatggatgtactaaaggnnnnnnnnnnnnnnnnnnnnnnnnnnnnnnnnnnnnnnnnnnnnnnnnnnnnnnnnnnnnnnnnnnnnnnnnnnnnnnnnnnnnnnnnnnnnnnnnnnnnnnnnnnnnnnnnnnnnnnnnnnnnnnnnnnnnnnnnnnnnnnnnnnnnnnnnnnnnnnnnnnnnnnnnnnnnnnnnnnnnnnnnnnnnnnnnnnnnnnnnnnnnnnnnnnnnnnnnnnnnnnnnnnnnnnnnnnnnnnnnnnnnnnnnnnnnnnnnnnnnnnnnnnnnnnnnnnnnnnnnnnnnnnnnnnnnnnnnnnnnnnnnnnnnnnnnnnnnnnnnnnnnnnnnnnnnnnnnnnnnnnnnnnnnnnnnnnnnnnnnnnnnnnnnnnnnnnnnnnnnnnnnnnnnnnnnnnnnnnnnnnnnnnnnnnnnnnnnnnnnnnnnnnnnnnnnnnnnnnnnnnnnnnnnnnnnnnnnnnnnnnnnnnnnnnnnnnnnnnnnnnnnnnnnnnnnnnnnnnnnnnnnnnnnnnnnnnnnnnnnnnnnnnnnnnnnnnnnnnnnnnnnnnnnnnnnnnnnnnnnnnnnnnnnnnnnnnnnnnnnnnnnnnnnnnnnnnnnnnnnnnnnnnnnnnnnnnnnnnnnnnnnnnnnnnnnnnnnnnnnnnnnnnnnnnnnnnnnnnnnnnnnnnnnnnnnnnnnnnnnnnnnnnnnnnnnnnnnnnnnnnnnnnnnnnnnnnnnnnnnnnnnnnnnnnnnnnnnnnnnnnnnnnnnnnnnnnnnnnnnnnnnnnnnnnnnnnnnnnnnnnnnnnnnnnnnnnnnnnnnnnnnnnnnnnnnnnnnnnnnnnnnnnnnnnnnnnnnnnnnnnnnnnnnnnnnnnnnnnnnnnnnnnnnnnnnnnnnnnnnnnnnnnnnnnnnnnnnnnnnnnnnnnnnnnnnnnnnnnnnnnnnnnnnnnnnnnnnnnnnnnnnnnnnnnnnnnatatatatatatatatatatatatatacacggtcttaattccatgtacctatatagttcttcattaatccccccataatttgtaatatatataaaaactgtaaaatgattgacatatatatcaaattatcaatgcaaaaaaataaggaccataaatagaaattaatcaatagctacgttaccatcgtgttataatgaaaacttctatttctagtagcgtactccttgaccactcttttaactgtgttagctagtgatccaagaaaccttcactaagtagtcctatcaatatatgtacctttcactgagaaagatcaatcatatatggtgcgttaatcgtcttgtcaaaaccatctttctccactacatattcgcaacttgcaaagtactcaaatgcaaaacacaccgcccatctctgacatttttgacaaaatttaccaaactatatttaagaatattaatcaacatcagtttcatctgcagtaattctaaatactcatttaatgctcttagatccccggccattaccatatagagacctgtctttcatttccatacaaatctaggtacatttatatatgacttaaagagagaaggagctaattaaccaaggggaagctactgcttaattactacacatacttatatataaacaatgtgaaaatacactgcaagctccaccatatgctaatagaaatgggttaagtgcatgtttaattctgtttatcttgaaaagataattattttaaaaaaaatcctagaaatatatactactaaaaattaataaatcagtgatcaaatttagtgatagaaaattacttttccttcaccagttaatttcgggatcactaaattttagtaacggaattcttttaaaacatatatagatcattccgttactaattttaatttttctagtagtaacataaaatataaaaccattatttttcctagataaaataaatcaaaacatgcactaggtttttagtaagttcatggctcttgtttgccagggaatgatggtagtaggtcttgcaataaaccacagtcacgagggagttggaactgctgctgctgttgaggctggggatggagattatgggaaaggttttggtgaaacattggattttggtgatcattttggctataacttggaagcaactgagcaagaaaatcttggggtaagcttgacgccatataagaggaaccaaaaaaggaaggtgatgacaacatgcttgcagcactgccccttagtgttgctggacagtgatggttgtgttgcccttcatatgttgtgatcacgattgttgggtcctggaatgatctctccacccttttctttacaccgcacttctgactcgtgcatctataatagctcctgcattataaataaagaatcaatcttccattcatacgtaaaatgtgcaattaattgatgagaagtatataatttcttgatgaattaataatttcttggtattgttgaatatatatacgtaagtgtaatattatggtcatatttacaatatatatgtggtatgtctccaatttcatcatcagatagtggataacaaaaacaagcctcaataagtacttataaataagctgttgcacaaccttagtatgacaagaatatgaatcattacatcgatatggcaacaaataaataaataaatagaagactttgtgtgtcaatatgtgatgattttggcacaccccaatattccacaacccttcttaatcatttttttcggctgatacaaatacaagagccctcatcatttttgccttaaaaggttaatattaatgtacaagtaactagattagaaatttcgaaattggaaaaaataattaaccttgggtatggactattcttgaccgctttctgtccatattttctccatctgtatccatcttcaaggtgatcgatctcacttttagtcaagaaggcaaagcgaggttctcttggctttttctctttctttttgggtttgttcctgaaacgctccaaaacatcagtcaaattcaccgcaagatggcagataatactcaccaaaccgataacaattattttagggttaagtgcctataattgttccacactctccaccattttagtcatacacacaaaaacctacacacactggatacagtattaagagagtagagacaagattgaccaaattcatttcataagagacactgaaagtcataaacaactgaaaagacacgaaatgatatatgggcatactataattgcattagtaaatactactaaatagtacattcaaagaagaaaattcaaaattctacataccctctagaaaataacagttaataattaataagataatcagatcctattcatgaattgttaaaagaagaaaaaagagaaagtctatgaggaaattaaaatcttcttaccctccattgatctataagaaatcacaaagaaagagggcaaaagaagaagaattttaatttaaacctactctttcttaggcttttcatctccttcttcacacccttttggctgcttatctttctggttcttggttgagtcttcttctatgattgcttcagcttcattggatgatgaagacacagatgaattaggtgttgattgttggttcccactgacccccacagactctcctcctgcactaggcttcttggggttttcatcaatattggaggagatcacttcagaagatgaacaaggcatgtcaaaggctcttgagagggtgttgtaatccatggaaccatgtaagcagtcagtgaaagtggtgtgatgatgagaagaagggttattatgatcatcaaacccttgatagtttaattgtgagccaattggtgctgagttgttgttgttgtccctaaagaatggaaagcttgatgatgagtggttgagttgctgatcatggtggtggttgtaatgaaagggatcataaaaacggtccttctcattctccatggaagagagaaactgaagagagggagaatgggagaaggagaaggttggaggaggaagggccagatcaaaaaataaaggtagctttgagaatgatatttcagctaagacttaaattcgatgtggttgcttgttatgggaaagtgagcttttggtttagaactttgtttttcttcttgcttttattcccttctacttttgcacctcactttagtgtttggagctaattggggagtgtttctctatcttaatctttctaaagtcagtgtgtggttcattttttttctaaagcaaatcaatttttcttctttcaaaataaataaaggaacaattgtttatatatacctgcttgtgcatgtggcgtgatttctcgatttaatagtaatacaccgtatattctcaaacaacatctaatcatattttacatatatcacttgtttacacacactttaatttgtgttgaaaaaaaaaatcttgtatatcttttttttgtcttatgagaacgttaaagttgtcgtcgcatgactttaagcttaagagttcaaatcttaaaaatagtaagttgctttatttttttttctgttcatatattatgcaatttgacatattttaaagggtgtaaaaaagtatataaaataattaacatgaggcaaatattttaatcctcaaaaggcaatcgattcgagaattattagtcagttggttgaaagatttattacctatatagttgatagcgacttctcaattaattgaagcactcctttattaatttatttgatcgttttgaatctaatcaaaagagaaagaaaaataacaagttgaataatgcttgcatgctaagatgtttctctttttatataataaaagataattgatgttatataagaaggcaacaatgctatgtattttattagaaggtttttggcttgctttgtaatgtttaagaagaaaaattaataaaaacctcaacctcaaatttacattttgtgttcatttgagctccacgtatatggcttggtttggtaggatcttatatgatagcgtgattgattatccttctagctagtatgttgacaaggcacaataccttctagctagtatatattattacatttctaaatacaaataaataatatgtattattacataaacaaatgaatataaataatttgtattcatgtacattagcattactatcattgttggagatagtttttgatagagaagggaagtgtcatgggggggtcgtagtcacgttgttaacaagggagtggagttagtcaagaattccgactataagcattttgtttttgtaattttggaggtttattcttacacgtgtcatgcgattgggcaccggcatttgaccggagagtgacacgtacgagagactcgttcgctgctattgttgattgttcagctccaacgcaaattcttcggtatttaaaaagtaagaaaaaacaatacttctatattatatattaattaaatacatgaatccatttagatataataataaaaaataaaataaaaaacataatgtataaataatagtataaatttaataatgcggatttttattctttctataacaacaagaagggaaaaaaaaaaaaaaacttatgctgttcctcatcacgcctagcttagctatgtctatgactatggctatatatgtgttgctgagtgggttttcacgtcccattccttttttccctttctttctgcccgaagtttgtggcacgcatctggttccctttccctcccttatgccttatcatatgctcatatgctcacactatcacattcacatcaaatcaaaagaggaaaataagatggtcaaatgtgatgtatatatccaacgccaaccccatttccccactcttctgtatttataaacttctcacttgtctcgtatggttgcatacactgtttttaattaactataagcaagagaataagtctaagcagatccaaacaaactaatgtttatgtatgtgcaataggactttatatacatgaagcatatcaatgtgtgtgtaagcattaaggttgttttattatgaacttttagactttagctccatatataaagtttcctgtcctcttttaattaattagatgtacaagtcaaaaaattcaatctaaagaatagatcgaggtaaagaggagatcaatctgctaatgaattattaattaacttcaggcgtctcataagacgaatcaaagtctaccattagtcgaaataattagatccttactatgttatttaggtcatctctttatatgttgttattcattcacactcttccataactcaattagcacttagataataatatattgccccttcaagtgtctcctaacccgaatttacgatggaaaagatatctagcatcgaatgatttctaggatatatgataaaatagtagaaaacgcctttaatttaatttttagtctgagatcttttgtacatggctacctttttttatttccttttcctttttcaattcagaaattaaagactttttttccccacttcagtgtagactagctaggagactctaaaatagcaattttttagataataatatatattgacaatctgcaccatataaaatatagactgtaaagtttattatcaagcctatattggtgcacttcttattttgtcttgtctttataaagtagctaggcagtgtattgatgtcaaaaggactcactatttctttatttgcttaagttttttaagaaaatatataaataatttaatttatatctattgttagcgttaatttaaccaccacaccattcttttaattaatatatgtggtgattgggtaaaatcctattgtgtaaaaatatgttgcaatacatataacttaaactaaaaaaataaattattaattagatttgattatgatataatatttgaatataagttagttaatctgattaaaatatgatagactcatttaaaagcgaatatttttacaaaacaagaattcataactttatttgaagattaccatatacaatacttataactacttaaactgttaacaagtgacagtatagcaaaatataatcggaannnnnnnnnnnnnnnnnnnnnnnnnnnnnnnnnnnnnnnnnnnnnnnnnnnnnnnnnnnnnnnnnnnnnnnnnnnnnnnnnnnnnnnnnnnnnnnnnnnnnnnnnnnnnnnnnnnnnnnnnnnnnnnnnnnnnnnnnnnnnnnnnnnnnnnnnnnnnnnnnnnnnnnnnnnnnnnnnnnnnaaattcgatcgttgaatatataattaaactttctgacattcattccttcatgtatagtaagctgaaaacaaaaacctcgattgaatcctgggatgttcactaatgaccagaccctcaacttaaagctaaagctgtttgttacaaatttacaataatatttaatagcaaattaaacatgagagttgagacctctttttaattgaaaaggtccccttttggagacaaaccggtgaatgatcccttaaaaataacagatagggttactgaataatatatatgtctgctccttctcaaagtaagacctcccattcccaattcccatatatctaatatctctgagaagaaaagttggtaaaccaaagacttttcttctgtttggtgggtgcaaaaatgcaaacccaacaatcagagcacatcttaaatgtccccaccaaaccaagctgaaaggaacgtcgataaaaggaggatcaacatctttttattcttgtattcatttttaagtaaataggattcatgaatttattgattcattttatagtatgttatattaaaacgtgtcacgcctaatataactttcatactttggctaatctacgtattagagtcatattatataggtacccctgttattgctatccgtgtttcttaatccaaacataaggtttatgacaaaaatgaaaaaaaaaaaaaannnnnnnnnnnnnnnnnnnnnnnnnnnnnnnnnnnnnnnnnnnnnnnnnnnnnnnnnnnnnnnnnnnnnnnnnnnnnnnnnnnnnnnnnnnnnnnnnnnnnnnnnnnnnnnnnnnnnnnnnnnnnnnnnnnnnnnnnnnnnnnnnnnnnnnnnnnnnnnnnnnnnnnnnnnnnnnnnnnnnaaaaaaacatagttcatgatgttatactatattttaattagtggtgtctaatataattctttaagaatatttgatgtgggagttttaaatatgtatatttagctgtcgatttcatttctcatcgagttttttagatttttataattaattaaacaaaaataaatgataaagtattttaaagtatacaatggtaagcgagatttttatttacgtgatagtatataggtagagtatgatgatggtaatttatatcattaggcgcaattttatcaattatcaataaatataaatttgacaaacaaatatatttttattagtcaagtatacagtaatttttggtacaaagtagaatataaagtattcatatatattagaaataaagagaaaagaaaactaaaatagaggttgtagcatcattgctttgcctttcccttgacttgactccgcctgaccacggaccacaggattttattacaagctggaatttttagtttaactacctgagttaattaagctcaaataataatactacattagattttattaaatatatagttttaaattatcaataaattatatctgttcacttatgttaaaaaaataataataattaaagtgaatatttgttattatgattatatgatatttctttatttatggattatttaaataatcttacattataacaaagttaattttcttttaatatgtatgttgtgttgaccaaaaaaaatcaaaagaaatggatggcaagcaagatttcctgggttcatgattatatccttctttctctgacaactgaaaagtctttatgaggagcatgaaattgttgacatatttgaatgcttttgtgatggattagacttggtaacttcaatccgatcgacttgctggcattcatcccgtacaacgttaatttgaatgctaaaagcaaaaaaataaaataaaatagatcgagatgtgattctcttctctctagctatctagatttcttttttgaatgatctctatctagatttaaaatctaagttttcgatgaaaattgcaaaaatttcttgtcaacaataaggcattaggttttttaaaaaagttatatttatcgtaatcaggaatatgatggaggcgaacaaaaactttaaaatgagttaataacaaatgagactcatcaccaaaatttatttaatttagaaataacataaggaaagtgataatatcctatgatgtacgttttaaaagaatagttactcttaaccaaatgtgtaaaataattatgattttattttacttccttgtttttgtttgtaaaaagaatgaggaagaaagtttatctatttattcaagaaaatggatgtatatttctagttaagaatctcgtatgatttttatttctttgaaaaggaattttttgttttgaaaataaaagggttgtaatgtctggagtccacgattgacgtggcgagtaataccataatgagtattccttgtcagccgtccatcttaatcattcttgggccacgagcatggatgttctccatatggccaatcctaggcagttaggccattatgcgagtatctgactgtcaaggtggttacaccattactaaagtgattgttatactattgcaacaacctctcagttaataatctaggattttcatccatcattataaataaccaggtattatattcactgtaattgaattgtattaatatattactccttcaaacgagcataaagtttcttttacgagtacttctttgtcatttttcacttttgaaatatactaattttaatcatttattcatttaaaattcggtatatacaaactttgagtacaatcaaagtcaatatgaattcgagacttgatcttatcgtttaaatattattttgacaaattgataaacttttcaaagagttaatagatatatacttctatcctatatatcattgtataaggactttcatttgttgcttattgaagggtggtgcgatatgtcccaaggacatgataaaattgttatgcccaccttctaatagttcacaccaatattctttacacttttaaggggaaatattcacacgaattacaacctcaaaagagtatgttggtcttccttgtgtttgtggtgttttgaatatgtcacctataatgattctaacactcaagttaatatggttagaatcaacttgagttagaatcaagggacgagagataagttgataacttatcttgcatagagtgatccaagatatttgtagtatttttttaacttaacattaatgataaaatcggttaagcattgataatgacaatgattgaaatattcttggagagacattcataattagttatgcagctattggtgtagggttgttaccctacatgtgtaagctcttatgacgtgtgattgagctcttatggtaaatgatttcacctaatgtgccattttaaacatggactaggagttcaaaatatgaataaatgaagaaaataaaactttgtaataattgatgagaaatgatacttgtaaacaatttgtacaacaaatcttacaataaaaaaagagaaaaggagcaaagtgagaggagagataaaattttaaaatgtaataaatgataagatagagagatataaactaaaatgatgtttataaattattttaagaaatattgtgtatgtattgtatctcatgattgtataattattaactttcttatgatagatgattataaaaatatactattcataaaacaattagatagtaacaacacattttataaatttttccatgaatcctatttttaataatttaaatcttaaaaagtagatttagtaaagagtaaaagattctccatgtaatcgttactcaagggaagtgattaagaaatatataagcaatttttttaattgaaatcatattaaaagtgtatttataacatttaatggtatattttttatttcattttttacggggcaatgattaataagatcacgataagaagaaaaaaagaagaataaaaaaaaaaagataaaaaagaagtataagttttgtttaaaatattattgagatattcttattatgattttcatcacgctcaattaatttttttaataaaaacttgtgttatttatttaattcgttaatagtcccgaccctaacaataataacagaagtgttgaggtttattaacctcctatctaaaattcttagccaatgtaagagaaagataaattttgtgttgtgtctcacggtccaagtctaacgttgtggagcatagaagagaaagggatgatattgaactgtgttagagtgacagttatgcctatgatggctgttccttcatggagacccacgtgctgctgcgcttcttcttcttcttcttcttcttcagtttcaaccatcaacactgaccaacttcgttctcaacttgatcaccttcatgcagaggctgacgccacctgagccaagggtacctacttaacttacccatctctcttattgttcttgttcattcttatttcattctgagttactttctctatctgaatcaaccgtgtttcctggacaacacccattacagccagtcccatgaatattatttaagtttaattttttttttttttttacttttccactacaattctcaccaaaagaattgaattggactgctgtctctaaagggttcatttaaagattgaggattgaggcttatattgaaataattgtgtggtggttaacgcttaacagcaactaatgctagattgaggcttctgcgactgtcagaggctgcagagaagcttcaaaagcaagcggctataagcgttcaaaaggggcaggaaaattatgcaagggaaatgctttttcagaggaagaaagtgttgcaggctttagacaagtctaaaatattgaattgctcgatgagctttcctccaagctaagtgaggtaaagtgtatatacattattgaattcatcagtactattgcagtatcttgtttgttgccagttttactttctattgtaattatgacaatatcaatacatttgagagagaacagctctgttagattcttaatgtaatgtatggccaatatgtttgaggaagggatttattcaactgtttgtgaaaaaaagttgtgatttgtttaccagtagaggcatgaacaactgtagaagggactgcatatatccctctcaagctattgttttcctctctatgaatatatcaatctgttttctatgctcatttgaggaggattcccagttttcatctggtttgtacaatgattgtctcaatttttctatcttaaatctgtatttcggtatgttccactgactgatggcataactgtgcctgtcaacctagactatcagtgttgaatatctcgtgtattttaaaagatatgtttgttttgcgtctatgaataatgtttattcccacccacactctgtatgctactgttgcttttactcaaaatgttcatattttagtaactgtataatgaaagaaacttattgtgggttcacgcaatatctttgaaagaaagtcagctaattggaaatgttactgtgaacgttgaagacacaacagaagatgcttcaagtccagttcgaattattgctccaaaggaggaagttcaaaatgatgtcactaaggatgagtcagatcattatacagtggaatttggtagcgataattccaaagtcttttgaccttattctggaatcccttagtattttgaccttattctggaatcccttagtatcagcactccaaatgaagacaatatagcgagaaactagtcagaaatatcctcttaagaggacttcatggatcatataaatcaaaaactcagtgaaattgaagctgaactagtgactgttttgaatgtctcaaccttggtactggataatgaagagagaccaaaaaattctaggttgcaacaaacaattgaactccttgagagcatccatggcattagacagaggtataacacttcaatctattaaagcataattcttattgtctcctttgaagatttaactataaaaatcattttagagtaggtgctctctagtgattttgaattattgatatgaatatattcatattaagcgaaaataataaaaaaaaaaagtaacgcaacactttttcaaatttccaaactcacagaattagaagtaccaaggaggccaaactgaggatctgatcaattttgttttgctcaactcatcttctgcttccaggtgagaactaacttcgtttgtttaaaaaaaaggtctgccacaattttcttgtatcccttaatcacttaatgtggaaacaggaaagacacatttgagatgctatattagtttattaaaatgaaaagaggtgttgatgttttgatttgccactattctttccaacacgcaatcatctgtttggtcatggaggagaaacagattgagaaatttgactaaggaataaggatagccgagtgaagttgcttgcccatgtccttaacttgcattccaaagtcttttgaccttattctgtctcaaaaatgtaagtagtagtgatattttttggaggattccatgagatgtcctttgtgtgtaaggtactgttgcatcaattaccctgcaagttaccacctaaagttcttattgttgccatgattcatgagaaattagatattaaatcatccatctactttgtatcaagcaggctaaaaggcgtggctttttttttgtgtgtgtgagttttaaatatggcttccatgattcacgatttaatatatttgtttcatgcaataccataaactcccatcatgtgtttgagtttacacaatccatgcatgatgcgtacgtcatatgatatcaggagcttctgcaactgcggatgaaattattctgtttatggactcgtgtaaattgtgtttaacactatccatgataggtgttgtttagtgtttaactcatttattaatcactgactgactaaaccatttgtttcagtattatagttattattttagcagctgattttctaattccattatttgatgtatgctacaatcctaaattttcgtacactaattgttataaaaaggtggcattgtcactgcatgtatcaaactaattgttatagactcgtaaccaaaacttagcaatttgcagaaaaagcttcgtggaatgttgagaacaaaaaatgtattctttaactagactgcataaatttctgtgtgaactaatgtactatgagatgtctcatgcatgctattctaaacgtctgaattaaggcatgttcaactcaggcctccatgagtggaagggttgaatttttattaacaattaaaaaggttaacctaaagttaacttctcttacaaatttacttgctcacaaacccacacgtggcagccatcacagagggagccattcagatggacagtcccttcttctccgagtctaaggtagctttatgcaaaaaacgttttcaaaatttattcagagtagagtaccactataatccaaattgtatattctttttacattgaggtatgtgatatgtgcctagcacatgatgtttccaagctcaattgaatcattaaatgcatcattttatatgataaatagatttcaattggtgtgaatgtaacttatgtgcttcaatgaggtattttggtctagattgaatgtttagcaggtgattagctaagaattatgcagagcagaaggtatggcgcgatccgcgccatctccgcgcgactagcgccgcaacctctggaacctggcgccatcagcgctaggcccgcgccatcagcgccacagtttcttcagccagcgccatgagcgccattggcaccattccttctggatgttggcgccgtcagcgccaggaccgcgccaggagcaccataggtcgcagagtctacataatgagggcaaaacagagatttcactggctactctataaatactgaagcctcagcactgaagaaactgtggcttcagtatttatatagtagccagtgaaatctctattttgccctcattatgcagactctgcgacctgtggcgctcctagcgcggtcctggcgctgacggcgccaacatccagaaggaatggcgccaacatggcgctcatggcgctggctgaagaaactgtggcgctcatggcgcgggcctggcgctgatggcgccaggttccagaggttgcggcgctggtcgcgcggacatggcgcggatcgcgccataccttctgctctgcataattcttagctaatcacctgctaaacattcaatctagaccaaaatacctcattgaagcacataagttacattcacaccaattggaagctatttatcatataaaatgatgcatttaatgattcaattgagcttggaaacatcatgtgctaggcacatatcagtatgacatcacatcaagaaacaaatagaactagcactacgaagtacaaataataagggcacccatgatcttatgatcacaagtattggtgcaagtaatggccaatgcttctatagttctattcaccgaatatccgtatttcatgcatatgggcaagtgacagcaaatggttggtaatgatgtgcaatacatttataacatttgaccaaaaataaataaaaataaaaataaaggatgaaataacactaaggttatctttgtggcctgatgatggtctcaggttttagtagcagaaacagtcactctacaatagtggtagtctcgtatattgctcctgcccttttagaagagatgtttggatttattagacagtttccatgaggtcagcaagagtaatcttgccatacatgccatgttccaaggaatcaaattgtttgcttatttggagaatgtctatctcagtaatcttccccatttgcttaagcttgtatttgacaaagtcagacttgctgcaccaataaaactaaaatggttaacaaaaatgaatgaaagtaatataactcagtagtcagtattctctattgaactgaaaatttctgcatcatctttgcatgcggattgaggcctattggctcaaccaggtaatctattttgctacgttgccttctcatttgctcaaattagcacgtaaatttctatattgcaacctatatgtttcaaagacattgtaaaccaaccatagtggagttatgtcattatgcatcgtgagaacccgaaccgttgacgcttgaactttcatgttccatcatcaatcatttagctacagatagttcctaaggtcaatctgttgttttggttaactcagacggaagagggtgaaatcatatggccatataagagagatgtgaaaggacttttaattaagaagaatcaaatttacagtagagcattgggacaagagtgaaagaggttttttatttatttatcctctttacaacatgataaattcttgatttaaaataaagtattccttctttaaggttggtctaagatgatgagggtcttttgatttctgtcccccatcatgcttcttttattgtgatttgtaaagctaaaacaactaggaaatgttcaacgaacctgatatactcaggggttcccctttgctaatttatcaacagatctaatttatcctacaatttcttattttctaagtgactaaaacaggctttagcgacgaacttctagtaatcttctgttcactcttgcttttgattaggccttgacttcttatagctctctttgtaaccaatgcacagattctgctataatccatttctacaagcgaaaaaatgacaaggaaatatattatatgaatatgagactacaaacattcaggcatacctgattgatccatcattatcaaggtcggcagctgctaaatatgataatgttatcttcttctgaagaacccattgtgccatcttacgatttctcttgtgaatactatattcagtgaggtatataaaggccctggcaactgccggtgtgcttaccaaaagccatataattgcaaagcatcttccggttactgttctgagagaaaaatccccataaccaaccgttgtaacagaagtaatggagagataaatactgtcatcccaattcaggtcctcaactaagtgcactgtgactgttcctatagcaatgcagccaatcacaacagccaaagcaagacaaactttggttcttatcctcattcttcctttctcttcatcaaccatataagtcctgagaattatcttatatctattctcatcaatcatgctcaacaagaaggcctcttgtgtatcacaaatgtattcaaccaatctattgagcagaaaaccaagaaatccaaaacccaccaaaatgaaagcacatgtaaagatcttggtaaaagtggagtcaggaaagatatctccatatccaatagtgcagagagttaccatcgtaaagtacacagcatctacaggcctgaaagtggtattacccctgaaactcccactagtcatgtacactgtcaccccagttgccacatacaagaaaacaccaagaaaagatagcctcactattgaagttgatgacttgtgtggttcagagggctcttgaaaatccacccccatgtcagtgaataataaagatggtgcagagcgagagcgatggataatcttccctttcttgaaagccaagttggctatgaagtgcatagaagtcttggcttcataggtgacatgatgagaactagattggaacagtgatggggcaagagcaagagcaagatcatggatagatagttccccaggtgatgatctgtttggtgagtctgcttctttcctagagcaagaactcaggagggattcctgcatggtgcattcaaattgtagttggggactagtgattacaagctagtatcacagcttctttaaactactagtcaaaccacagagaagattggaggatacatgtatattgtagctgagagtcataactcatatagcttccttgcacaaactttattctaataaggagagccagtgagtatttttaattttaatttaaagtgacgaattactaatattgaagtgtcttatattatatgccccaactagaaccgaatcactaaattctattttgatcccaactacgtggaacacgaaccccttgattgtatgccccaacatttggagtccaggactgagccatggcaagctagagtgtaccctaatagagaaaaaggaagttagttacatctacttttccttggtggtactgatactgcaatgccgtaaataattgattgattgattagataaattataaatgaggagaaaaaactgatccctgtaaagtgtaaagtaatacaatatagctgtacagggaatgagttcgcccgattgcagaggatagctgcttataattaactgaattatcagaaacagttggatgcagttccagtaaggtggctgaaaatagacttccaacttccaagagcaacaaacaactcatgaaatatcgtgttgccatttcttttttaaactttttccgtgtgtcctaaaatagttccttcagtgataaaatcattattattgttaaactattgtggattcatttgtaatcatcttaatctaaccaccaaaaaattattacccagagatgtcaagagataaatcatttctcaagtcaaatcaaccttggaaaaaactattttttacatttcaacatcttttattggtaacacctaataggctagtgacaaagacagcaagataattttttgagccatatatccatagccctacaaaaatctagcgactgcacaactttgacatcatgaaacgatgatttgcaccatttggtagccgaactgctgcagtttgaggagcatccttgtgaggcaccgtttttcgtacttgtgcatgagtttctgcttcatgttgaaacatcctgactagctctcgaagctcttgttttctcagttcaacattttcttcaatgatgggttttttcaggccaagataaagcaatccaattccaattagcacgacccctagaacaaagaggatcacagtgaatagaagaaaggcaaaaggagttcctgaagatcctggtattccctccacatttatgccaaatagtccagtgatgatggaaagaacaaggccacaacccccaaatattcccaagttatgggtgactgtgaggcttctgtcctaaaataagtaggaagagtgtgattattcaacataataaactcccctatactctctattttctatatatcatcaatgtcaatagcacctttaatccaagttaattaggattagtggtagatgaactcaataatagatacgagaaggttggaaaaaaaggaaaataagataaaagaaaagaagggagaaagatgaagaggaaaaagactaaaaaatgattatctagaacatagaaataacaacagaactaactctctctattttctatatttaaataaaaataaaatgaaaaactggattgacaccaacacgcacatgaatatatgtcaagactgtttctatgtagaattatacaatttcatcaagtatcatgtatatatttttgctaactgatgtgtgtacgcgcacagacactatccgagtgtactactacaatttttaatttgcattatgaatgcaaaagtgatataagaggcaattaataaatatattacaagaattactttttttcttgattaaaaaattagagtaaatccttattttagtcctccaaagataaagatgccaatcctagtgcattatcattccttattggatacaaattatcatgcaccagtaataatgccagataaatcttttgcacacttatatagctactgtattaggtacataaataaattcaatgaaacactagtagcttactaatttatagattatagttcagtagttggtaaaaaattaaaaacctgcaaccatgcccggactgagctttgcatgacatcttggattatgaataagcgacctcgaactgcttcttgctcctcaatcatttgtcttgtacttttcattactccttccagcaacactcttgctgcatttcctctcaaatgttgaagaagttcaaaaacaatttcctctcgtgcatggactgaccatttcactcttataacctgttaggtcatacaagagataaaggtataaaattttgtgtacacaatttacataattacttatgtacccaattttattttacttttacataattacttatttaaataaattattagagcagtgcaatcaatgaaattgtgcgatatgtaaaagtttcactcgctacaacatttcttatttttatttaacaaagctacagtttgtagcagactctctaccagtacagtattagtcatgctgtaatctgcataattacctgggttgataatcttgtaatttcttggttcagtattatagtgaacagatgcaaatcctcatgattcctcctaccaggaaggaaagaacattgtgtatccaagttacaaacaaaaaagataaaatgcacacctatgtcgcacttaagttcttatatattttataaaaaaaaaaaaactaatatatagtggttcaaagcacttgcaatcacctgttcataaacatcaattcaacttcatctgcagccccaaagatgtatttacgaaacaacctatgatatcatgtgcattagtaagaaataattatgatgacactgcactgcatattagataatgattttagatcacgatagaatgttgaaaaagtaaaccattcacaaagatccaaaacttatatttatcaccaagaaaactgattaatatagcttatgctaataatagcatcagattttaagaataggaaattaatcagtttcagagaatattgttaacaacaaattaaagagagagaaggaaacagggtgaaattacaaccaaattcagtctaaatatatcaaaatgaaacaaacaaaacacgtacataaattaatactagagctaaagccataggcccactacccagtttgatgccccaaaaagcaggatctatgagggaaattctatgttgaactaaactataaccttgtgtgactgaacagaaccttttgacagtagtaagaacaaacaaaaagggggattctatctttctctgttcaattcctttctttttattctttatatggcaagtcatggatttcttaatcctagtttcactctctgttcatgcctttcaagagggcaatgcattccttctaatcaaaagtaactggttttctctatattattttttcttggatagaaataacaaaatccaagaataaataaatcttctatgagattaactttttaagtcatataaatatgatgaagagtttacaattattcataatcttcacttccatgaagaggatagaaaatccatttactgaatataacagatcatgaatttccactacacatgcaacatggtggcttgcatcatgacacacagtatgtttctctttagcatatatgcatatgattgttgactatgaaaaggaataaccaactgcaaacagtagttgttgaagctccagttgcaacactcagacaacccaaatagacctaaatcatattttgaacttcatacatttggtcttaatgtgttatccaccagataactttatcatgttccttcaaattctgacagcaagcagataaagcaatttcatatattctcccaaattttatacatactcttttactcactcagatattcgttacaaaaatatttttttcctccattctgcgtgtaatttaatcatatctaactagcaatagagcttagaaatagtataccaatgtatatatgcttgtatttttcagatagtatccagatagcagtttaatttgaagaattacaattcttgtacgctttaccttgataaaaagcattgtctaataaacacacgctcttagcaatttagatattcatagttcaggtgtaaatttaattacaccatttccaacagattcaatcaagattatgtttatctgatatttggaagttatatatagaattagcagtggaagaaaacaaaatcaaaatattaattaaagggaaaacagtaatcatcaacagcaaaaccaatagaaaatctaatttggtaacaagatataactaatactaacctatcatcccatcgggcaagtcggcaagctaggtgtgctacaacctcatgaatgctgcacggtatgttagcccctcctgcagccagcagttcctgtataacatagttgaaggcaactaaggacaaaaatagtaaaagaactatacttctggcggaataattctttgattaaggatttcaatcctccagagttactctcagaactgcatgaatcccattcattcaatttatttcattatataataaattaatatcttccaattaaatttaataaacttcaattgttagatccacaacagccgaggatccatatctgactgtctgatgaatgagggggcaaaaagactaactgacctgaacttctaaaacacctaacacattgatatttgaagcagagcccttaacatgcaaagcagtcaccaaaaagttttgtgcctgccatgcccgtaagacaacgggaatgtcatcttcctcggcaaatggatccccagcagactgccctagaagttcaaataataatcctccagcaacacgaactggaacctatcaaaataaacatcaataattaaaagcttattttataaaatcaaatgccttttcacctttacattgagtcattgatttttactgaaagaagcacaacaaccaaagacattttctgaagacaacaatttgcataatggtaacagcaaataaacaaattagcacaattcactttcagtctcaaacatcactagtttattcaattacctcatacagaaggtgtttcattctgtcactgattaatctactttcttcttgcaaagcaatgctgatggcaggatgcaaccagcgagaactaccaaaccatgcagtaacaaaaggatcagaagcatccaaatgacaccaccaagtgggccccaccggccgttcccagtaaggagttgctacatctgcaacaggaacatcactctcatcatctgtgaaatcaaaaggcggtgaatcaccaccatgtactgcctgaacaagttcagaaattctatcccaaccaattgatctccagtaactccttggaagaccctcgttgcaatacaaatgaggtgacactgattggtaaatctggtcaccaaaatcatctccatgtgattcattcaaactgtttccaattctccctacgcaataatcactctgattgccttgaaaccccttcttcttggtaggtccctttcccctcatgaattcaaatgcacaaataagtccattagtccaaagttccccaccctgctgcatgttattgttagtctctctggtggaataatgggttttgtgattcccctgattcttcatttcactggtaaatgaagctgaataatcttcattcacagctcgcattttgctctcaagacgaggaactagagcctcctctaccattgatgagagagttaaatgctaatgaaaatcaaagcatcatcatcacaagaaataaacaatcaatgtcaacttgatcacgatgatgattcataacataaaataaaacctcagaaactagacaaattaaatcaatatcaatcacagggttcctaacttagtactaccttgccataaacattaatgcaatgtctgcaaattattatgatgatgatgatttcaatttggatgcaaagcacaaaaataataaccacatgcaacaattaacacaaattaactgttgaataaaattgaaatggagaaaaagaggcatactcgaactaaagagaagagaagctaggcttttatttatcggagaagacgaggagaaccgctacgatggtcatggtcacactcagtcacggtcaccaactcaacctctttcacgtaacgccaacgttccattaatatatgaaatataatgttgttatatatatatatatagagagagagagagagaataattttgaaaaataatgaaattatattattaattaaaatatcaaaaattaaatatatttactatttcaaatatttttaaagaaaatactttgaataatagttataattttttaaaaacttatataacttgtttataatttgaagaatattgattacataaataaaatataatttttataatttagttatattattggtttgccatccgacacatacaaatatttgataggattaaatttaggctaaaatgtaattatgatccttctattttttttaatctataattttaatgtttttattttaaaattaagatatttgattcttttatttttaaaaatttataattttggtcagattctcgatttttttacattttatttcttatttattttgttttggtttaattgaaccctaaatctaacgtactcatttaaaatatcttcaagaaatgatttaattaattacaaagtaaaagataaaagaaataaaatgtaagcaatattaaatcataattgtaaattttttaaaatctgtagtcaaaattgtgtcttttctaaaattattttttttaaaatagaaaaactaaatgtctcaattttaaaatagataaatcaaaattacaaattatgtaaaatagaataaccaaaattgtatttaagccaataatgacttaaataaaattataatctctctattttatttatgtaatcaatatttgaattatagaaaatcaataatttaagcctaaaacttacataacttgtttatcatgtttttattatattttattcttaccctgttttcatatcccaagtcacaaccatgaaatgaatcattaacttaataagctgaaaataaattcaacaatttattagtagagattgtcaagacttacaatagtgattgtgatggattttatttatttattttgctaaaagtgatttcgatggatagagataataattttatttttactttttttaaggcaatggaatgtgaaataaataatgtaaatacagaaactcaaataattaaataccgtaaataattcaaataataacttcgtataattaatattaaatagtaactcaaaaggtacaattttgaaaaggtacaccaatccaatttagtgattctaaaagcaaactacaacaatttggtgaaaaatcctttttatgactccctgtgaataatgttttaggtttaacttcaagtggtaaggaatacgatctttggtagggtagagaaggcaatactgagagtgaacaagctggtgtgctgtgcagaaaggatcaccttacgtgactaattaattctaatggtaatcttattttattgcttaatatcatcgctttctagttaatgttgcatgtatgtatattgacgtgggtttcattattgttgctttgtctttcaatatattgtcataaatatttgcaatttatgtcagaacctggtgaagccactgaccaggaagagattgagttagtttgtccttcagttacattaattttccatagcatctgttatgggggaacatacgaataggtgagtttttcaagcaatctggttgttcacgcgtgaattcaaaggaattatgttttttatttaattttgatcatgccgtgtcgtatacaagtgatccttcttcaacagtttaacttaatctcaagtaaacccttaaaattgtttaacccgtataacaatttagtccttaattacaattttaaaaataatccattaagtccttctcaactttataattaaaaagtcactttcatacatgcattagttgtataataatatatagactatatccctaaaaatttgtatgtgatatgaaaatgaaactccagagggattatgcaaaacatcttcaacatgcattattaatttgtataactcaaattattccttaacattgttatttacagactaaaaatttagaattttctttgtaaatattatattttattttaatttttcattagaaaatgttaattattatttttgttaatttttattaatagaaaaatttaaatccacaatttctctcctcctttatctttttctctgatagtcaaatcaaccttataatctcattttacaaattttatatatgatgtgagaaatgaaaatattgtataatgatgacacattggtataacactgtcgatcatttgaaaactgcaatatagaattatttgtctgtaaaattgatgcagtgattccatatcagcatttgctcaagtttctggatctggaatctcatcaagttcaagccattttccatgtcaaagtcattctgaacacccaattactggcaattcacaaacaacaaacatgactgcatcatcatcaagggctgcaatatttgattttcaaacagaaatggtggatgacctactttcatctcttgaagagcatgaagagcactcaacagcaccatatgcccaagaccttattgtgcagtccccaaagcactactactttcaacaatttataagactaccccaaggtcttcaaatagcaatcaagaatctgcagcaagcattatctggtaggactgtatatcgaatacaccaatcttggacctaatttcctcccatgcatagattgcctccaatagaatatcatgcatttggttctcaaattttttcctctcccatccataacgttgtaagttcaatctgtccaataatccatgcatgtatttcttcaagtgacttcaataagattttatcataagatctactttaatggtttaggcgttgtattatttcatgattctgctctactaatacgaactagatctttattgtcattaatatcagcaaggtttcctttattgggtcatggagctggaccaagatctttgtctttatcatcacattctcatcagattttggctcccttaccgtatacacttgtacagtctcacattctggctccttctccaccaacaagtgctgttcattctcatattctgacttcagaaagtcctacaaataatctagttctgactactccacattatacaagtcttgtacctttaccttctcagaccctatacatccaagaagaacttggcagcaaggagattttcaagatttgtcatccgacggattacatcgaaattgaccaacaaactaccactgacagcagcttactttctacgtattatcttttttctatatttctttcatttttgctagttgcagagcctaactattgaaaatgtacaatttagtttttaataacttattaattataagaacagtctcttatttaattaatgacatcttaacccttttaaaatatttatgttttctatttttagacacgattttgaatttttttataattattttaatgtataaaatgtatttcattggattcatctacatgaaaattataagaatcaattaaggatttgtttgataagtttctttagaagtacttctaaaagaagaaaataagaagaaaaaaataagatgaattttttcataagtaaaaataagtttttcattaactaatttttagttaatcaccaatataatttctctagaatatgagataatatctacaaataaactaataaataaaaaagtttatttcatttttttatttttacttttttttctttctaaaagtgtttttagagaaacttacgtccaaccaaatagactctaaatttgaaacaaaaagaaactttgacaagatgaaaatttcataaaaaatgagtattatgagtaataaaaacctgaaaaatctaatatttatattcttttctcattgataataaggctcactttttacacggttttcattggttttagtcgttaatttttttttttaattggttttagaggcgtcgaatatttacaggttgtgacccataataagtccaattccaattctattgacactaaaaaggaatccatgcttgatgcaatgcgagaggatccaaaactaatcagatgtctcagaatttgtatatgagaagatctcaaaattagatgctacgatagcgtctcaaatgttgaatatgcagtaaaaatcgtgtggcttagcatatatagcattcaacgtgaattcctttctaacgtctctaacacagacctagtgaaaatcaaccaatgtggattctttgaaatagttttacttaatttaattaattagttttgatttaaaaatttgacttgcattttaaaactacaatctagttactatatcaaattgatgagatttattttttctaagattattgtcaccttattaaaatttaattaaaatttaatttttatatatcacattaaacatacacaaagataatatatcttgtttcaaataatttatttccataattccttccacaattttagtaatcttatatctttaatttatttactatatattaataaaataaagtgcctattttaatactaaaggcatttttaatatttttttcttcatatgtgtaaatttatcatatttagtaacatgatattttccttacatgttttaatttttaaaaaaaaaaatacttatactttggaaatatttgtgcatgtcaagatatgtttgtgcatgttttaatttaagactgtggaatacaagaccagacttggatcatgtcaagattccaaaagcacgagagccttctattctcccagtcttctctacagttatgcataacataaaaaggctcagagagtttgctagagacactgtgaaacaaaggctccaaacatgttggaaatgccaacaaaggtttgtacagttggtaagaactgagttcatattccataaggatatataagttcattctattgtcgatgtgaaaactttggtgagagatgatctataagcatctttgtaagcgtttttttgagcctcgagacctccttaggtcttggtggaagccggtagtttgcatgattcaccacctcttcacctccctccggttcctcaacctgtccttcaatgcattatccagcaaagttctttaaatctcaggactcagcagacacagaacaagacctcgagcagaaaggagaatttcaagatttgtcatccaacagaggccaggaagaacttaattgccttggaagccattcttcttggtcacgcttcctctctgtcccctcatgaactcaaaagcacaaataagttcattaatccaaagttccctagtggaagaatggtacagtgcaagaacattgagcatcaaaactagtcaagaaatcactagcagcttagtattttccacatatcactcttcactgtcattttttataattagttgacaattgcttatgcggcaaaaactgtttgcagtgttagttgcagagctaacagaataattgcagtgttacttggccgaacagaattacacactcaatgttctcttcaaattcccctctctttccctcttccttgctcttctttctctacactaacttgacttattttttgtcccgagggagtgaaatagagtatttttgtcattcatatgtgcgtgagcgttcaattgtatatgcatcagacagaactgaacacgcatatcatgtttagaacaaaggggcatgcaattctatattattataatgtgagaaaggaggtataggtggctaatattgcgaagtaaagcgtaataattatatgccatgagatatctgttggagaaggcaattgacatgagccaagttaggcagagttaggctgagtaatgcaaaaaacaataatttgtggttggttggcattacttaactccatcctacaaaataatcattcttttgggatcctataaaatttattgtcacaattcaactacataagcaattctatgaagcagaaaagagcgatttgctctttgttactgcacattttcctcaaagtgtcttatgtttggtgaaatggatagaaagcaagaacaagacaacggaaactcaaacatgtctggcattgatgtagctctaatatctcccaaagtcccaaaagcagtttcaccagtttcttctgcagcagaaggggacaccttaaggcgaccacgtggccggccggccggctccaaaaacaaacctaagccaccaataattgtcaccagagatagtgctaatgcactgaaggctcatgccatggaagtgagctcaggctgtgatgtgaatgaaagtttgttgaactttgcaaggagaaagcaacgtggcctttacatactcaatggaacaggctgtgtaacaaatgtaacattgcgccaaccaggctcagctggtgccattgtgacccttcacggtcgattcgagattctttcactgctggggtcaatccttcccccaccagcccctccagggatcacaggcctcacaatttacttggcaggtgctcaagggcaagttgtgggaggtgctgtggttggtgctttgattgcttcaggccctcttgtaatcatggctgcatcattcatgcatgctactttcgatcgccttccattggaagatgatgaacttgcttctgcaatgcagaatcagcattaccaaaatggacgcacccaccatcttgatatttctgacttgtatgcaatgccacagaacctgctcatgaatggtacaatgcccccagagatatactcttgggcaccagggaggaacttctcaaaaacctgaaacttagcatactatttgttagttgttgtctcacattcacaaatgtactgtactgtagctatcaggggtcttccaaggttgacattgcaaaacaagatgatatgcttattctgatctattaagaattattttagcaaattaatgggtgtaatgattttcaatacaataagatctacttttcagagttaatattgcatattgcagcattttgtgttagaacttcaaagcaaaacatgcatattccacagaagttgagattggtaagtctagcaaggtttgaattacattcactagcaaaaaagcaaactttagttatcactacactaaaccagctaatagtaaaggttgtataaatatcaatactaaatagcttttttctgaaggcctaaagcaacagtttgagtgaccttatgcatggtttagccctgcagacagacctagattcaaatttatacaagcttaaatagacatcacgttttctaattaagttaccaatatgactggaataatttgggaagacataatattataacaataatgaaatggatttttgcatatttgaatttcatgtcatggccctgtgcccctatcttactctttctactttaggaactttttttccctaatcaaactaaaaatcccagtgtattgacaaacaaatcggatatatggttcgattgtgagatcctcatatattgtaactcttctctgtattagagctacttccttacatacagattgatttttaaatttcacgagttcatcccttcggagataatcaatcttgaagtacaaaactggagtcattcagtaaagagtaaatctctcgagctttaggatgtagcctccccccagccaagaactcatgaacctctccatatagttctattgaactgcatcctggttccttctctgccaatctttctctcatcaaaattctttgctccattgcctcttcaaattggttggatgcagcctgaacattagacataagtaaataaccactggcatcacttggatttaactcagagactctttgtgcagctcgtttcgcaatttctacattcccatgcttcctacaagatgaaagcaaagccccccatataataaaatctgcctttagaggcatacactttattagttgttctgcttcttctagtagcgcagcttgacctagcacttcaaccatgcaagtgtagtgttttatcgatggctcaatctcatacttatccatcatcagtgcaaaatagtcccttgcttttcctattgctcctatatatttacaagcagttaaaacaccaatgaaacttatatggtctggctttaaatctgaggcttcaagcttagagaagtactcaattgcttttctctcataaccattcatggcaagtcctattataatggagttccaacatgataatcctcttgtgggtgatgcctcaaacacttcaatagcctttacaatagctccacacttgcagtacatgtcaataattgctgtgagaacaatgacattcaactcaaaatgacccctttttacataatcatgaacccactccccatgtttaagtgctcctaaatgggcacaagcacttaacaagctcaccattgtaaattcactaggctcaaccctttctccctgcatcttgcggaaaagctccaatgcctccatcagcctcttattcctaacataaccactaatcatagaattccaagtaactctggttcttgtaggcatgttatcaaacaacctcctagacttatcaacctccccacacttagcaagccccataatcatagaattgcaagccaccaaatcaagttccagaagttcatcgaacactctcctagcctcactcaataacccactattagcatacatgtaaatgatagtattttgaataaactggtccttctcaagacccaacttaacaaccctcccatgaagctgagctccatcatagccagcacccagttgagcataagccttgaaaacagaagggtaagtcaagcgttgtggctgaactgatgaagaacacaacatatcaacaaaaagagatattgcaagatgtggggttgagctccgagagaagcctctgatgatggtgttccagcaataaaggtttgggcttggaatggtggtgaagagcaagtaggcatagttgatgtcaccggatgaagaggcgcagaaagtgaggacgcggctagcagcaacggtgtggtgagcaaggccggttttgacgatgtgggcatggatcttttgaaggtctttcatgttggagcattgggtttggagcatggtgaggcatggttggtcggagatgaactttgctatggagggtgatgatgatgatgatgataatggaggaagtgcagaacaaagagttgacattgtcattgtgtgtggtcgggactaaggaaagatagatgatgagtggactctacacttcccttttgagctggaaagtcataactaactagatataaatctgcaaactgtgggactactaaatatataagaaaaaaaaatttatcccctctttataaaattagaaaaaaaaattataaaatgtttttattttagtggattcttttaaataattcaggaatcaatacatgattataaaaatatgaatgttttaatattcaatagtttaaagccaaaaaaagaaaggaaaaatatttaacaaatttgtttgtccaaaaaagtcaaataatattaaagagtgtcgttatctttttcaaaattattagattagtcgtgttttacttaaaaagagtgtctttatgactttatctatttttttctttagttttattttctaatatttttataacattattttatagtattttcctattcaatgaatgtaatttaatttgtaacgcacattgaatttgtaggaaaaaaatctgggtttgatcttgcataatacatcacttggaaggtatgagaaattttagtgtgactatgtttgaattgaagattagcccaataactaccttaaagattcaaagtttataaaattacttagaggtttcagtagaaagataaaagctaaaattacaatgattaaaaaaaatagtatttttctaatgtctgaattctattatcgtgcattttttcttagaggttcttttgtaggttatttagcctttttcaagttgtttttaccattaagctccaaatgaattacatgtcaaagtatttaacttgatagttaaattatgatatttgtggccaatgcgggttggcagattggttaacaatccagattgaacttttatattttccatgggtgtggatttgaatctccttgatgtcactttttctggtaggtgggcatccttcttcaaagagatcctttgacatcttgtaactaattgagtagttgtaatcgaatagagttacttcctttaggcaataaccctctattggcagtcctaggctcccagcatgtcactgatattttgtgcagtagtatttgaagtatctttccattctaccattttgaacactaaaacgaaaatgtgatatttgtataagaaaaaattgactaaaatataataacttaagactcaattgcatttgattcattaatatgggtcctgtttcgatataagctagtatttttttagaacttttttattagaaatatagtatttttttttcagtagagaaattctcaaaaacacttctaaccttgaattcaatcagacnnnnnnnnnnnnnnnnnnnnnnnnnnnnnnnnnnnnnnnnnnnnnnnnnnnnnnnnnnnnnnnnnnnnnnnnnnnnnnnnnnnnnnnnnnnnnnnnnnnnnnnnnnnnnnnnnnnnnnnnnnnnnnnnnnntatattattttaagtaataaaagattttagattttaactttattgtctatcattatatttataataaaaaaaaaaaaacttttatgatcatgccaatcaagaagcacagtttactcaacatataacaaataacattattttactttaaaggcaatataaaattgagaataatcttgtcttgtatgacatgatctaagtaatttgtagtggaattcaatgactttgatacaattatctagttagttcacttcaatatttaccccaaaaaaagtgagttaaactcacttcaataaagtttgacctttatgctgatgaacaaacatgggacatgggttgggctgcaatatcatggccaccgttctttacaacaaaagcatggaatcagctaaagttaaaattatgaaaaaagctgataggaaaatcaaatggcagcaataggtagtgacacttttgctcctgcacgtagaaatcacggtcaaataccaattaacaacccaaccgtgtcacaccttgattgaaaacaaaaatatcataactaaaaagaatacttttaattttcccttgatttatgaacataataactgcatgtgtaaaggcaggacatataaaaaagagagaaaatgagaaacacaattttcatatagaggatcttaggaagaagattgaatatatggagcgtttgagcaattttcattcgtgagaatcatgttttttttaataaataattttttaattgatcattaaaaaatttaaatttttttaggagttaaaaattatgatttttattgattattttaattattttccatattatataattgaataaaaaataatacgatgattttattgtagtaaaagaaaaaaattaaacttgaaaaagtaagttttcacttgatttggaagttttctattttcatttaaaaaaacataaaataaaagtaaaatacatttatttaaaatttagaaaatattttcaaaaataactaaaaacaacaaatcaatcttttcaactttttttgaaaaaatgaaaatgcgaaaacattttaaagtaatttcttcttggtttatatttttctaaatcttagaaatttaaaaatgaaaacagaaaataaacattcataaatacttttgagaatttttttaataaaaatatataacattttcaaataaaaaaattcttataaacatttctaaccttatattcaaacaaacttataattttatacttctccaacaaagtactaacataatgcaagtcattttatattttagatttatatcctattaagaataaaggagaaaaaaacaagagaagaagaagaattagaataagtcatagacaacagcaaaaggagaagaatagaaaagagaaaggcaaactggacacatcagcaccatcattacaatcatcacttacaagcccacaaaccgagtctatattccaaacaattcttcctttacttcgttttcaaccttcttccctaccttttccctcctttttgctccttctcttgcttgcaccctccaacactctccctcaccacaccccgtttttgctttcttaaaccctctcctttgtctcagtcaacctcacagtcttccactaccactatatatacttttagttgcatgattaacccacaaaacaaccatcttcctttttttccctctctagttcatcatatcttcctttctctttcatttagtcaaaggaagaactactattactggggaaccacattgaaaaagaagtgagagaggacaagcaagtgccaaagaagaagaagctgaatagtaagattaaagatggaaaggagtgtattttattatgtaatatttctcttaatgtgtcatttcctctgttcaggtaattccctttctctagtttattgtatagttcttcttctatcttcttcttcttttttatctttggtttagctctgatggctctattctgatactgtttcttaattctcagtgtctttgattctcattttccttctttttcaaatttccaattgcttattctttatctcctgcacatattctgtgtttttctctttaatttaattgttttggaccccttgaatttgttttgaattctgaaaccacaaaaagcttttttcttctctcaagtttgcatctcaattgttttattctcttctagttttttagttcaactagtaccattatggatatacattttggactgattaggagaaaatcacttcttttttttagtttgatagtccaccttggcttctttctgttggaatatagtttactaattgagcttttcacttttttttgtttatggataataagtttcctagatcaaaatattgtctcttgtattattccattaaatacttgttccggcaattatagagccacaccatagaaaagtttaaacaagtccttttcttgctaattattctggggtttcacatagtacagttgcatccaacctttctccaattccaccgtttcttgaaaagatacaaagggcccaactgctttgactcacatatgcctctctctacataggataccctacctgtccttaactgactgcccttctagttgcactattccaagttgttgccttttgaaatgatggagaggtccaagtcttcttaagggcataaatataataattagtttggatcaaaatttctacaactattccaatgaatagcaaaacagattttgttttccataccagcatgaatgttatacttataggcacaatttgaatctagttacactttttttgcatccctttgaaaaaggaaaaggcttggattgatttcaaatctatattttgatttctctcttcacatgctttggacatatagtacagaacaaagtaattcagttgttatttcaaacataggttcaagtaggacacaaaaggaagtacctgtacatgtgaatgtactaggacatgatgaagggaaacaagaattcactgcctcaatttctacagtccaaagggatattaccactcccatcaccaccattccaaacttagttcccaccatttcaacatctccattcctgaatcctaattccaatccaggcacagtctctccagcctccacaatcccatttaccactccaaccactgtgaattctccaatctcctcaggtgcaagctggtgcattgcaagcccaactgcctcacagactactctacaagttgcattggactatgcttgtggctatggtggtgctgattgctcagcaatacaacctggtggaagctgttacaacccaaattccatcagggaccatgcttcttatgccttcaataagtattatcaaaagaatcctgttccaaatagctgcaattttggtggaactgctgtcatcattagcactaacccaagtaaggcctttgctgttataattctcgttgcaactttttcaataacgttacatgtattttaattttaaggcaagtccaaaggtatggtcaagtcgttgggtatattgaaaattcaaccaaaaattaggcttgattacaactcttttccttactttttcaatttcacaacatctttcaatattttttttccttccaaatttgagtccattattttagttgtggcatttttatttatctgtttacttactaatatataatatttaatagaaatgtcaacatgtcactataatgcattatcacattaatattttcatattgacgtaatattctattactatattattatattagtatttatattaaatattagattataagttgacagataaattaatgcataattaaaaatagagaccaaattcacaaataaacaaaaaataaaataacaaaatttgtaaaacaaaaaattaaacttagaaaatagaagttgaaatttagtagacgatgaaaatataattataaatggaaaggagaatgcaaactagtagtagaagaaacgtgtgccacatagtttaaaaaataggttgggtgattaagtcatgacattgggttattagattattggttaaattagtgaatcattaattgattcgtatgattcgatctgtaataaaaaatgtaaaatttttatatctatcttaaaatatttctcctgatatatattgaaattcaaaaatattaaaaaacacatataaaatataaagaatacaagttaaaaaatgattattatctctaatatttaacattaaatacatcaacgataatatatatcaatattcatattaaaatgaaacataattatatcacatcaatctagattataaaatataaaaattcaatccaaagtttcaaatcacaagtttaagaaatgatttgagatcacaatttcacttgtaactcaaacacaattgcaatcatgtttagatcaatttaactcaacaaaaaatgcaattgcaactacaaaaatgctcaacaatgagtgaaaagatcaatttaactcaaaatctcacacaaactaaaataaaacaaaatgaaaaaacaaatctaattggattcacttgcagctctaagaaacgttacaaatgagacgaagaaatgagaggttgtcgagcggagcaactgagtaagattactgagaagaaaaagaataggatgataaagtttctaaaattaaaatggatttaaatttaaattacgttattttgattttaaaaaaaaaaaaaaaaaaaaagtgaccatctctggatcgatgggtcaccgttcaaccaaaattccgaccgatgctttgggttagaaaatgcaaccaattgaacttgactcaatcctatgcaactatcgaatcgtgattcaacttatcgggtcgatttgagttttaaatctctggtgtgccaaattgatacagagagaggttgggtcccttgggttggtaatcagacgcatccctgcccatgattgttaggttccttccattctaaaaagactacaaaaggaagaaacttttattgcatatttgaattgattatagcctgtgacttggggttggggatgcagcagctacaaagctgacatctgtgtgatgcaaaagtcaaacttttattcaacttttttggaagcagcatctccaaaaagcttcctttattggccaattggggtaattttttttcaaatttatcatttgaagataaaatttaaattaatattttaaaatgggtaaatggtaggtaatttattatttttgaattaaaaattataacatgtattattatttcttttttacatgaaaatcgtaaaaaaaattattttttattattttaaacacatcttaaagtagtaagattattttttcactcagccaattttaaagttgtaattttttttcttttttcattaaaatcgtatattattttacatcttcaaattctttttgtacttttcttaattataagtaatttttactttaattatttaatggatatttttagttttatttaatatattttatattttatataatattttatttaatattatttattaatgttaaagactattattgattttgtaaattaagaaaaagtacaaaagaattaaatacctgttatcacaaatagtatctataagtagctattcatcgcaattttttccattaattgtgcttatatataccttgcttacgaattatacagagaaaaataatattagccacttatattcaaaatgaagtaacataatgctttgtacaaaatttatgaactcagtggttaggattatttacggataataattattttttaaagattttaacttaaaaaattatgaaaaatatttcttcaaaaaaatgatgatatatacacaattattttagtttctttttctcttaattgaatgccttgcttatttaacgaattataaatttgtaatattcattctcacctcttacctgaccattttcataacaatttttttcgaacataaaaatatcttttatgtaagattttgaacaaaaatattgaattcaagatttgatctttattaaatttctcactaaaagagttaaacatatctttgatatggagaatgagtttttttttagaagaacctttaaaatatgcatattgtttaaaaaaaatactttcttcctcttttcttcttatatctcaaaataagatctattactaaagaaaaaatgaaaaaatcttgagaaattttcaattttacttgtgatattatattaaaaaatatataaaatttcaattgaaaatctaatattaaagatgcatttaaaaaatacttttgttacctttatcttgtacagaacatatacattaaaatttgatgtacatttttgttttattttccagcatagaacactatgctcctccaatattatttaatttttggttgttgagaacatttgatgaatgcatttacgtgttttgcaggcactggggcatgtcaatatacatcaactaggtgacccaatcttgtcatatatatgctttcattttttttaatatacatatactatgctttatttgttaatgttacaacaattggaacagaaaatatcatattaattaacttaataattggtacctaaaattgcagcactagtacatcagtgttgaacacaacaaactcaagcggtgccaacgtttttggttcagtgccagtgcctacagaaccctctccctatgctgctgctgcacctgacacattaaatagctttgcagatatttgtgtcgttctgtggataatttcaactttgcaaagaaattatctctgaaatggttgagagttggaggttgctgctctgagtaaataatttttgccccttttagatactttttgggagacacaaaagccaatagctacatgaccatcaacagcacataaatggtagaaacatatggtagaaagaaaaggcaatttcagatgatggacatctgtagaaatatatactgtacataccttttttattttatttttgtgttgctcatttttttacgttagaattgttagaactcagaaaaataaatatatctttgaagttgccttatgaccttatctgtttagttatatgaaccaggatcagttttcttgtctaagctaaggatctacatctaatctaatttttaacaaacagaatggattacactaaaaagatgtaaatttcttacatatataagtgaccaactcatacaaacaatttttctttacgttttgctttatataaaatatcattatagaacaatttgaaccaataaaataattgttgttgcacaatttgaaatataatgtatacatgttgatttaaaatataatttcttagatgtttatttttttccaacgtgtagttaagatcaatatgttggcattacaaaagaatatgtgtagtggtgggtaccatcttttgattctgaccattggagtttgttcacatggcatgtactgaaggcacatgtcccttactcataaattctcacaacttcaactatgcaaaacaggaagagaataaacagtcccaatgtcccatgtcatcctacaacgggtttagggttacctttttcagtcactgtacaaccaacaaccttctttaccttcacaagtaataacttgaactaccttctaggaacatgtcactcaccacctattatacttggagtaaatcaataaggtaaatactaatcatttcattaagaacactggttaagaaatttaaaataaaaatatttttattgagaaataaataattatactgtccataatttttattttattttttatgatttacataataaacaataaatattttcctcttttaattcttaactaatgaatgtctttaagacatcagttagtaaaactcattgaataaatgtataatatatagtgacctttaaattcacatcttaacttattttaaaagaaaactaatcatcataaaaaaaactaagtttatatgaattattttttaaaataacttttgtaaaattaagtttgtttttgaaagtaaagataatttactttttttaaataaaatggagtgtaaatacatcttaacttattttaaaacctannnnnnnnnnnnnnnnnnnnnnnnnnnnnnnnnnnnnnnnnnnnnnnnnnnnnnnnnnnnnnnnnnnnnnnnnnnnnnnnnnnnnnnnnnnnnnnnnnnnnnnnnnnnnnnnnnnnnnnnnnnnnnnnnnnnnnnnnnnnnnnnnnnnnnnnnnnnnnnnnnnnnnnnnnnnnnnnnnnnnnnnnnnnnnnnnnnnnnnnnnnnnnnnnnnnnnnnnnnnnnnnnnnnnnnnnnnnnnnnnnnnnnnnnnnnnnnnnnnnnnnnnnnnnnnnnnnnnnnnnnnnnnnnnnnnnnnnnnnnnnnnnnnnnnnnnnnnnnnnnnnnnnnnnnnnnnnnnnnnnnnnnnnnnnnnnnnnnnnnnnnnnnnnnnnnnnnnnnnnnnnnnnnnnnnnnnnnnnnnnnnnnnnnnnnnnnnnnnnnnnnnnnnnnnnnnnnnnnnnnnnnnnnnnnnnnnnnnnnnnnnnnnnnnnnnnnnnnnnnnnnnnnnnnnnnnnnnnnnnnnnnnnnnnnnnnnnnnnnnnnnnnnnnnnnnnnnnnnnnnnnnnnnnnnnnnnnnnnnnnnnnnnnnnnnnnnnnnnnnnnnnnnnnnnnnnnnnnnnnnnnnnnnnnnnnnnnnnnnnnnnnnnnnnnnnnnnnnnnnnnnnnnnnnnnnnnnnnnnnnnnnnnnnnnnnnnnnnnnnnnnnnnnnnnnnnnnnnnnnnnnnnnnnnnnnnnnnnnnnnnnnnnnnnnnnnnnnnnnnnnnnnnnnnnnnnnnnnnnnnnnnnnnnnnnnnnnnnnnnnnnnnnnnnnnnnnnnnnnnnnnnnnnnnnnnnnnnnnnnnnnnnnnnnnnnnnnnnnnnnnnnnnnnnnnnnnnnnnnnnnnnnnnnnnnnnnnnnnnnnnnnnnnnnnnnnnnnnnnnnnnnnnnnnnnnnnnnnnnnnnnnnnnnnnnnnnnnnnnnnnnnnnnnnnnnnnnnnnnnnnnnnnnnnnnnnnnnnnnnnnnnnnnnnnnnnnnnnnnnnnnnnnnnnnnnnnnnnnnnnnnnnnnnnnnnnnnnnnnnnnnnnnnnnnnnnnnnnnnnnnnnnnnnnnnnnnnnnnnnnnnnnnnnnnnnnnnnnnnnnnnnnnnnnnaaaaaaaaaaaaactgtggattcatgattgtgtcattttaggaccaaaagtttaatgtattgttaaatttaatttaacaaaatgatgcttttaacaatttttataggcatgaaattattgtcaatactataatagactactttttaaatatattcattgttaactgggcctcttattcttattattgtccctcaacggctcaaccacacccaaaatgatataatagactacttgacagttaaacatacatttaattatttgatctactaactaactaatagcagaaaactaatttcataaataggaaaaagacaaatatgtgtgcatgtgtataaaactctttattatttatttatttttatttgagtttaattatttatagttagtgcaaaatatttttgtacaagtatttcataacttatacgtgagttttgttaaatgtctaaatctgatgaaccgacattccatttaataaactcacatagtcacatacccaacaacaaagagtgttataagaatgttttactatttcttgtaacattaatactcatttacgtttgtctaaccttataagttttttggagagtgatattaaaaattggtaaataagttccttttataataactttatagaacaaaatgcataattattttaaatttcatagtaaaaaatgactcaataaacaaagtttataactatcataaaatatgtggctgttccatggttttgtaagatctttatgcccaagtacagtcttaactttgactaaaacattgtttggcccatagaagcaacgtgtcttcatatttaaagtcttgagcaaaggggttggtgtagtcttgttagtttagttggtagttcccctgaccctagtgcaatattgcttgaatatgcctaatgataagaataggataacaaaaatatcttaccaaggctaaattctaaattcttctattttattaacatttcttcatcatattgctaaaacctttttttttttactttttaaatttaattcatgtcatgaaaaaaaatatgatgagttaattaatcaatttgtttacaaaaaggtattaaattttgactattttgtcaatgtaattttgttttttgcaatatttatcatatagtaataataaagtgcatacaatatcatttagtgaatattagatttnnnnnnnnnnnnnnnnnnnnnnnnnnnnnnnnnnnnnnnnnnnnnnnnnnnnnnnnnnnnnnnnnnnnnnnnnnnnnnnnnnnnnnnnnnnnnnnnnnnnnnnnnnnnnnnnnnnnnnnnnnnnnnnnnnnnnnnnnnnnnnnnnnnnnnnnnnnnnnnnnnnnnnnnnnnnnnnnnnnnnnnnnnnnnnnnnnnnnnnnnnnnnnnnnnnnnnnnnnnnnnnnnnnnnnnnnnnnnnnnnnnnnnnnnnnnnnnnnnnnnnnnnnnnnnnnnnnnnnnnnnnnnnnnnnnnnnnnnnnnnnnnnnnnnnnnnnnnnnnnnnnnnnnnnnnnnnnnnnnnnnnnnnnnnnnnnnnnnnnnnnnnnnnnnnnnnnnnnnnnnnnnnnnnnnnnnnnnnnnnnnnnnnnnnnnnnnnnnnnnnnnnnnnnnnnnnnnnnnnnnnnnnnnnnnnnnnnnnnnnnnnnnnnnnnnnnnnnnnnnnnnnnnnnnnnnnnnnnnnnnnnnntaaaataatcacttaaagattaaaaaatatataataaatatacacatgagcaaagtattaatttattgtatacactcagacatacaatagacatgacttggagtgctcctcttattcttattataccttgcattgcatgattctctctctaatttgttgttatttattgcattttacttagtatatccgtcacaatagacacgttccttgatataagtacacatgctgaacattttttaagatgtacaatttcttttaatactatctttgtccctgtaaaactcttctaactaatttacaagaattaaaaaaaagtagttaattcaatgacattaaatttactaataattatgtcatctttatacaattattttatggtaactaatcatatcatttttttctttgttcattccatctaattaattaatgtataaagaaaatagtggttatagaattatcttctccaatattcataagtgcaaagaagaaacaatttacaatatttgttatttattaactaattaaatttatttgataaaaaaatattaattaatataagagacaattctttttatataaaaacactcttacaaaaagtgaaatacaaatttggtgtaagttatgtaagcctcatattcctagtcaagtcctagttactttaaagaagcacagtgtacgtaaagtaaatatgcttgcttgacactgtcattccgttaatatcacaatcataaatgtcatatccaacaagaacaaaaaaaggaaaagaagaaagaatcacaaaataaggcaacataaaaataagtgtataaaacagtatgacatttcaaaatatcattgaaaaatgaaaatcccatattttttttttcatatctatcaatagtattttctccacttgtcttcttgcacaatcccttcattccctgccagcatcatgtacttatccctcctagtaagtgtggtgcactcaaatcccaaagcacaagccaactgttgctgtatatagtttgccacttcacagcttgaccttcctccagcacatgttagttccttgggaacctttccaagaacctcaatataatagctaggccttggattcatgagaaagaaaatagggtccaagcatttcaaaccacttgctgttgtcccatagaacatgctcacatgactattgatagccacaggaacaatctcatcagccaattcagcaaacagtgagctgaaccttagtaaatatggttctctacaagttgttccttcaggacacaccactaaatcaccttctttgaggagcctttgcatggtttcaccatcttttcttctgtcccttgttagtctcactgtcctaataggggctatcaactcagacactttgcttaggctgtatgtgactgcagtcaaaggctttgccaaacatgtgcttaggaaaacaggatcaaggagagtcctgtgggagcatacaaataggacccctttgttttgctctgacttttcatcagggacattgcctttgacttgcagatttataccactccaaacccctaatgccattgcccatccataaggaagtagaatacccaaaaggattctataaatggctaaaagaattcctaatggaaaccacataaacatatatagagttgctgagggagtaggcaggaatgctagtcttccatcatggaatattaggggctttggatatttgtcccttggcaacactgaactggggttgcccttgccctcttcattgttcaccacatatgcttcctgtcattatcatgtagctggaattaggcacaatacattaatagatttaataaaatcatgtctactaaattacaatctaaatcaagattttaaaaaaataaaatcatccgtgactgcaattttgaccgcaatgtcaactcaaactataacaacattggttacttttgttcgtaagttcctacaatattaaagatcgtgacacaatcgagacaatgactgcaggttaaaatcttgatataaatgcaatagatttataatatgctgtgctaacagaacttatcataaagggaattaaaactgttcaccagaacaatacgtacaggttatatgttgaactttgattggtctttgttttttcaatttaaatggttttgttttttttattaaggcgtgtaataaggtctcaggtccttgatgggttgtggaaacagtgaaaggttatttaagaacaatgaagtattgaacacgcaagagttaaacagttagtgaggtgattaaacagtggagctaacttgagacttaccttgcaaagggagagaaaaagatgatcatgaacactagagcttccaaccccaatatcaggctttgtgtctccaaaataatccttcagtgctctgtgcttcacaagtaagccagaaccagaaaccaaaccactgaagtagcaaccaacagtgtgcaactctgtgccaacaacagcaccgacactcaaatactccctaagaaacccttccaccataactctaggcacactagtgaaaacaactttagaccctgctgaggccagaacctcataagcatgaaggttgagattctccaaataaaacttgggcaaaacagcccttgacatattttccatgacacttgttcttagcccacaaaaggtgatgaaggtcatgaccctaagacttaactcatggtctaaaatccacaacacgggacaagacaagagcaagaggagtgcccttaaaatgctgccaccttcaaaggcaacaagcatgaaataaggaaagaaggagtgggacctcaaaaggactctatgaatgtcacaagcaacgagtgtttgtgagcttctaccctccaaatcacatttggtaacactagggaaagaagaaggttgaaggggtggtttagatgacaaatagcccaaatggaatccataactcttcatttttcttgctgctctataacacgagttagcaagcagctggtacaagacccagtctgcaagcctcagaagcaccattgggaacaccatgctattttttttttctttcaaattggttgatggtgatgataaagagaaggagcaagagagtaaatggaataagaagagtgggactgtgtctatctgtggtgaagagcaaagtgtgcagagaatatttatagagtcattaaaagggtgcaggagaaagttttcatggtagcatttggttaaccacaccgctggcaataacttcaccttccacatttttttttttcttttcttttgataccatttttaagcattggccataatagtagcattttttctttcatgcaagtgccctctacatgtttgccagataatattagcttggctacttgacataaatacagtaggtaggttaaaatgttggtgaccgcttaagagagagtctttgtttgaaatgttggcccaaacacacactgtgttgcctattttaaatgacatcggcatgtgtgtatcatccctttgaaaagcccttcgtcaaataaatttccatccaatacttgttccattttctcttgccacaggccaatggcaagttagatcacccacatcatccaaacaattgactttttaaaccaattgcagaatcatccctagtcaaattgttcctatcaataaaaactgtcgttgactactagttctagttctatttctatattctgaaagaacattgatgatagtactcagtagtgtcttggctaaggaattaagaataatttttaattgaaatattatatttttcatgttttttctctctttatgaatatgtgatatatatttaaaaaatattttttattatttagtaagtgtccggtccggacgtgcgggttagtaagatttaattcttttttatatatatggcttttttttattgttagataaaatatatgtgtaattttatttagtgaaaccttgtatatataaaagattgtttgaaaaactatgttgaatggtagtagcatttttttctttttattggaaaaattttatattaagataaaaaaatgttaaaaagctacttgatagttgaaggttgataattgaaaattgaaaattaatatattaaataataaatatttgataaaattaattgttgaagtaattgaaaaatataaaattatttaaataataaagaaaatatgatttataaatatgtgacttatttaaaaagataataaaaaaattggatagatatattcaaaataaaaaaatataaaaaattataagttagaaactaacattttaaaaacattattttaaataatgtttaaaaatatttaaactattaaaaaattattaaaataatttatttatcaaacaatcaaataaatttataattaaaaaaatttatataaattaattaaaatattttggacatggcagactaagtattaaccgtttgactctgttttgttatgttgttgtctacggctctatgcattccattcccaaggctatttactgatcataggtgggacagttatagggtttgattttaattgcttaactaatctgttgtctgtgacgtaattatcgcaagtcccgtgatttcatttgaaattaattgtttaattgagataattaggcccttcggcaaaagcatactttctgcacagtctgatatatctcaggagttacagtgacttttgcattatattattcaaattaattaaataatagtatatatctcattctataagtgtaattgtttaatcattttatctgcatggtacttcttttacattaaacactagacgcatgagtagacttatatgttttgactgaaaatattagttattcgtcacttcaacttaaatgaagccatatttatgatagtaatattgtgatgatttgtacttgagaagtgagaagctagcatctgtttttaacattttttgtttttgttttgccataaataatttattgtttttgccatttcgtacaagccagacaaggtaggtaaaggttgagcaaattattcaaaatgtaatgacatgccattggtacacaatctttgaaaaccttatggaacttaattatttctttgctgttctgtttgttcgtgtgacggttagaacaccaattcatgtcaccctcattttgtggtttggtgaacccttaatcatttgatatggctgttcaatgcacatagtttgcatggaatcgttaagaagattcacgtatctatggcttctcatttcatttctgtttacccttcttgcgtttcttgagtcaataaaataaaatacaagtttccttaaattatttgtattactgaaatatnnnnnnnnnnnnnnnnnnnnnnnnnnnnnnnnnnnnnnnnnnnnnnnnnnnnnnnnnnnnnnnnnnnnnnnnnnnnnnnnnnnnnnnnnnnnnnnnnnnnnnnnnnnnnnnnnnnnnnnnnnnnnnnnnnnnnnnnnnnnnnnnnnnnnnnnnnnnnnnnnnnnnnnnnnnnnnnnnnnnnnnnnnnnnnnnnnnnnnnnnnnnnnnnnnnnnnnnnnnnnnnnnnnnnnnnnnnnnnnnnnnnnnnnnnnnnnnnnnnnnnnggataagagtcgccaaaggaataaaaactcgaattgataaaatgattttttattatataaatatactttttttcccttttatattatctataattttaagagttttacattagtttgttcaagaataattctaaattcttcaaacaatgagatattgcaaatagcatgtcaagcaacaatcccacttggtattgcttgcataattttccaagccatacacaattgacacaaatacgtcactttcctaaataaagctaaagaatatgcacgagacgttaaaagttgggtgagcttgcactcaagttcttcaaaaaaataaaaaacttgcactaaagtttgcaagaagttcataaaaagtcttattaatttatttcatacttggttgcttttttgctttgattataatttctaattttttttttttgttttttctttcattttttaaatacttatatgttctttatttttaactaagtgattaaatacaaataattaatgagttgatagtctttgcttgattatatgtgcatcatgttagttaaaatttattaaaaattataaaatcatgaaatagaattattaaataaaatgtgaaactcaaaaaaaatataaattttaataaatttcaaataataaatgataatgtgttaaaaaatgcgtcaaagaatatgttattaccttttctttaaatgaacatacaaacataacaaaactcagatttacctgttgaatgaattgaatataaatacattattttttataaattacttatagatgaacactataaaaataatttaattataaattcacctaattaagttaattgaatcatcgcctacaaatattgttttttttttcttggaaagaggaactgaatgtggaggcccaatcaagtgctcgcctaaaacttcttacatttccactattgtttcatacacttcccattgtactcccattatttttcattttagaatgagttttccataatgtaatggaaagtgcaagaaataataatgggagtgcaggaagcaacagaggcctaggccctgaaaggaagtgaaatgggcaaaagaggcttaggcccattagtgtgtcagtttcccgccacatatatgttgatcttcccgccatctcattcacacacaccaatcacttcgctctcgatttcttcctttcccacttcgtgaacacaattctccaattgattcagttcataatttcggtcgcaaagcaaatgatcccacatcaagaacccgatttcaatctcaatcacctcaaactatattacggttcgtcactttcacttcccgtttcgtctttttcttttaatctctgtaccaaattagcatgattttcattgtttcgtactgggttttaatcttttcaacgttttctcttctcttcttttcgttttctccaggaaagctgtttccttttgctgatttagtcagatgggtgtcttatggcaacggtaataatatcgccaaatccatgcttccaatgggtgttgaatggcgatgcattcttaattttaattttaaggattaaatatatatttagtccttgcaaatagtatgttatttgttttttagtccctctaaaaaatcgtgtcattttagttgtccctttaatgggtgttagggtgttgttttcgttcttcacaaaaattcatctcttttttggtccttggtttatgtaaataggaaccacacgctgatgcattcgtagattatgactgaaaacatatttcactctaattttatttttaatttgtttttatgggggattatttgtagaagggaagcaccctggttgtgatcaatcctacattgggcgaagagagttttccttcactctggagaatgatatatatctgcgcttccaatctttccacaatgcccacgagctcgaaaactccatcaaagaaaaatgccctgttaagatagatattggacctgtctacactgttgatgtaaaatgttcacttttatccaaatcctctctacctagatttcattattatgcttcaagtcttttataattcatgcaaatataatgattaatgcagccagcgattcttttcgtcattaatctgttccttgtatttggttcagcctgcaaaaaggaatgcctatgcacagagtggtgataataatgtctttgccccagttgagagggagttgatttttgatatagtaagattttttgcttgagtctttgagtgaagcctttagctattgtggccttcttcacatttgacacccttttgtattttgggtttctataggatatgtcagattatgatgatgttagatactgctgttcgggtgctgatgtttgtttggtttgctggccgttgatgactatagcgatcaaagtgattgatactgccttaagaggtagtattttgcatcttatatgatattggagaagtggtgcaattttgtcatttatattgttcattacattgaaaaaacaattattgacataataagatagcagtacatctcatataacattgaaagaccatggagttgatgtaagtcacctggcagaatcctcctaaaataacataagtttgcctcacaacacgtatgattctcccaattcataacatagggaaagtgactttactggatttggtcatctctcaccatgatagatttatttttgctgaagcagaaagagacatgatttctacttgaaaatttatgataatagttgtagtctaggctgtatcttgtacgtttcattatttcaacataatttcctgaacattgttattgctgggaaatataaggcttcaacaatgcctaatatacctgttagaggaggctcaatacttaagttagccttcactctgtgatatatgtatggtatggtgttatttgattttaattacacctattactgtattacatgctttgaggttcatcaagcatctcttctgcatttatttccatcccgtttctgatcttttattgtgcttaatctttattcaatgactgagtttttttgtcctaattctttatggcctttgggttgagatgctcttcatatatgaaaatggtcaaaatactatgggagggagggatagaatatgcaacatgcattaaaattatatttaatagctttgtatatggcaagattgagcccatctagtggtgattgcacaaaacaactgggtgttatttgttttgggagagggggggggggggggggnnnnnnnnnnnnnnnnnnnnnnnnnnnnnnnnnnnnnnnnnnnnnnnnnnnnnnnnnnnnnnnnnnnnnnnnnnnnnnnnnnnnnnnnnnnnnnnnnnnnnnnnnnnnnnnnnnnnnnnnnnnnnnnnnnnnnnnnnnnnnnnngggggggggtctgcattttttgtaactgttgtgttgacttttgctcttgggcttctgtttcagatgactttggtttcaaacacattctctgggtatatagtgggcgcagaggtgttcattgttgggtctgtgatggaaaggcaagaaggtgaggcactaaacagtaaacaatcaaaagttatcctttatctacttgtggctgtacagtcataaattaaaataggttgccttcactcatacaggttgacaaatgagcaaagaggtgctattgctgactattttcgtgtctacaaggtatagtatactgatgacaagtgggtttgtcaatacttgtataaactttttgttgatttcatatgctgtccagggcaatgaaaatagtcacaagaaggtttctttgatgggtgctgctcttcatcctttcttggcgtaagtcttaatatgaatcattaactttctgaaccagatctcttatttcatatgctaagcagtattttatttttccaggacatcatacactaatgttctcaaggactattttgagaaaaatctgcttacaggtcaaaatttacttgctaccgaggagagatatgagaagatccttgacatgattcctgatgaatgtactttgttttctgtcctcccttcatataaaccttgctctttcattccctgctattatcttatgcaatacatgagttacttttgcagccattgcttctgaacttaggggaagatggcaagatagtaggcggtcttctagtgcaaaagaagacatcaatgttgttcgatgggaacagtgcaaacagttgcttcaatctggaaaacataaggtattcaagcttctttttaagaaatgtagaacaaggtgacaatgcaggaaatgatgcaggatttgctgaaacatgtatcatttgatattgctatttattattaatgttttctaatcctttttgtaggcacaagggctgcgtcggtgcattgaagagattgtgttctgctttacctatcccaggctagatatggaggttcatcttttagctggcctttttcccatatccactgttatctttcatgctatagaagaccaataacaccttttgactaatttttagtctgaattttgttcattaagactgttcatgttttaggtttctaaacacatgaatcatttgcttaccattctgtgtacatcctaaaacaggttagtatataattatgcacaatttttattgacataaccagttgaattttttatgaggcttgagaattcactggtgacattataatcatatggttttatgattttatctttatatattttttttatttttactatcttccagttaaatttgattgatagatccattagctcatttgactgtttagcattacatggtattgttctttgttctaggccgagtttgtgtccctattgatccaaaacggtgcgaggagtttgatcctactacagtacccaccctttcacaggtatacttattctgcaatgatagttttctgatatgcattccagggagagaaaaactttccaaaagggtgcttagttttcaatagcgatgttttgtatttactacttctgatctggaacttgcattaagacacttgctcccttctccaacacattttcatgtgtgaaaaggaaaacacataaggatgctgctttctgagaatttctggacatctcgtgtttatgtgaatcttgacattgttagttgtatgtaacattgcagctgatagaagagcttaattatgaagtctcaagagctgatgttgatggtggtatgttaattttatactcaatccaattttcctgtttattaaaatcttcacattgccatcaccacgtgtcttggactctggggatcctgtttatgtacattgatatgttccttcaattctaattgcaacttggattccattacaagggaaagtgatttttaatgccttgtttgatagcagaattcaatagaacttcgcttggaaatgctattacacttttcagatcgtcattcttacagcctttactaaaagcctgcaaggtatggatcatttcataaatgttggtaaagtttagtaattttcccttaaacatcattttattgcattaaaaaacttatgcaatgtaaaaaccttgatattggtattatgaatcatttggaaaaatctattccatgtgaaagaagtaatatgagaatgctaggaatgactcattttctgtttctcatttatacgtgtatttttttttctttattacaattcaaattctttaaaacattggtgttgatcttaataatctgataccttattacagattcagtattcaagtattaccttacctatcataagtattttaaataatgaatattgcaggaggagatagaaaattcctataacttaaaattgcagcagtcaaagaattcccttgcttggtagtgccacctattattgattggtcaaatagagctgtcttggggtcacacattagttgacaatcaaatgatgaaatgttcgttgtactgttgaatctttttttgtattttcttgcaactacaaccgttctttctacttctggtgagagaaaggaagttgatttgaatatttccatccactgtataaattttggatgaaacagttaggtgttccgtgttgttccgtgttatctataagaatgtgtttggatagagaattttaattggagaaattaatttatcaaagaatttaaaattctttattttaaaattcattgtttggatgtttttatatgaagaatttaaatttttaaaattttaaaacagaattttaaacaactaaaaatgtgaaattctaattttcttctaaaatatgagaaattgaaattccttcttctataaaagctctcactacaccaatctttgctttgtctccatcgtcggcaagtactctaacttccgttactcccacgataccttcctcatgcgtctctccccgtgaatgaggtttaaaattttaaaatgaagaaattcaatttctttatccaaacacaattttgaaaatgaaaaaattttaattgatatattttaattttcctgaattttaaattctctgaaattttaaaatactccattcaaacatactctaaaggtatttttgccaatgcgtaggaatagtgaggtatcaatttccattgaattcagcagtaattttaatgtaaaggactacaagtttatgcatcatatagttttccgggtattttgaaaatttgaaggactgaaaatattactattgtcacagcacagcacttgcagtaacactccaatttttttttttcgtactttgtctggagttttgttttatagaaaattaggtaaatgaccatgctaggtcttattgtggtttccattaataaccgatgtagttacttaattcccactattcttaaactagtccactagatcgtttttgacattgcgtggcaactaaggaaaaatgtgtttcttggtgtgctgttactaacacgtaagctggtaaagtctctcacgagtcaagattatatagtaaaaattgttattatgtggctgtgaagcaagttatatgaaaatacaggaatagcaaacaaaacaaaccacaacatgacattttatgaagtccaaaatccaattggatagcaaccacactgcgagcagccctatcagttgggtaggtccaaccgacagagaaaaggtctcacatcttcgctggtgttcatatggcaaccgtatattctcgttgcccctcgatggaggctaggaatatactcctattaacccttcatcctaactcaaattcttaagtatggttaggatgattttttttggcattgtctgttttagtgttcagtgatccatcactattttatttttagtgaattatgagagaagactatttataaacttttcttggcttcaatttttaagccatatgaaactttttacatgtaatccacgaagctgtgtacttatatacgactctacatgtattgcttccactaaattagtaaattagacgccaaaacgtagggaaaggtcaaatatgtaaatatgcagccctgtgctcaagacaacaatccgtacattacgcccaagggttaattttttttcggctgcttatgattattgtgtcaactcaatcattcatgctaaaatcttttttttttttaataaagatgggcttgaatactgagtcagtcagaaacaagtaattccaactaacttggtatcattaattaggatagaaagaaaatacaaatcaaagaaatatcattaaaaaaaaagatatacaaaaagtcatgggggacaataatcaaacctcgtgaaaattcaacttatctgttaaaagaatttataattagaaagacttatcttatttatattgtattctgatatcacaaaaggaagaaatcaatcccaccaatagaaaaaattaacgcaggagaggtaagaaaatttgtataaatatcgtcttttatgtaaatatgacctatttgaaagttcacgctcaaaattaaggtttttcttattccaaaaaataaaataaaaattaggtttctgttttttttttttctcctcgaaagtaaannnnnnnnnnnnnnnnnnnnnnnnnnnnnnnnnnnnnnnnnnnnnnnnnnnnnnnnnnnnnnnnnnnnnnnnnnnnnnnnnnnnnnnnnnnnnnnnnnnnnnnnnnnnnnnnnnnnnnnnnnnnnnnnnnnnnnnnnnnnnnnnnnnnnnnnnnnnnnnnnnnnnnnnnnnnnnnnnnnnnnnnnnnnnnnnnnnnnnnnnnnnnnnnnnnnnnnnnnnnnnnnnnnnnnnnnnnnnnnnnnnnnnnnnnnnnnnnnnnnnnnnnnnnnnnnnnnnnnnnnnnnnnnnnnnnnnnnnnnnnnnnnnnnnnnnnnnnnnnnnnnnnnnnnnnnnnnnnnnnnnnnnnnnnnnnnnnnnnnnnnnnnnnnnnnnnnnnnnnnnnnnnnnnnnnnnnnnnnnnnnnnnnnnnnnnnnnnnnnnnnnnnnnnnnnnnnnnnnnnnnnnnnnnnnnnnnnnnnnnnnnnnnnnnnnnnnnnnnnnnnnnnnnnnnnnnnnnnnnnnnnnnnnnnnnnnnnnnnnnnnnnnnnnnnnnnnnnnnnnnnnnnnnnnnnnnnnnnnnnnnnnnnnnnnnnnnnnnnnnnnnnnnnnnnnnnnnnnnnnnnnnnnnnnnnnnnnnnnnnnnnnnnnnnnnnnnnnnnnnnnnnnnnnnnnnnnnnnnnnnnnnnnnnnnnnnnnnnnnnnnnnnnnnnnnnnnnnnnnnnnnnnnnnnnnnnnnnnnnnnnnnnnnnnnnnnnnnnnnnnnnnnnnnnnnnnnnnnnnnnnnnnnnnnnnnnnnnnnnnnnnnnnnnnnnnnnnnnnnnnnnnnnnnnnnnnnnnnnnnnnnnnnnnnnnnnnnnnnnnnnnnnnnnnnnnnnnnnnnnnnnnnnnnnnnnnnnnnnnnnnnnnnnnnnnnnnnnnnnnnnnnnnnnnnnnnnnnnnnnnnnnnnnnnnnnnnnnnnnnnnnnnnnnnnnnnnnnnnnnnnnnnnnnnnnnnnnnnnnnnnnnnnnnnnnnnnnnnnnnnnnnnnnnnnnnnnnnnnnnnnnnnnnnnnnnnnnnnnnnnnnnnnnnnnnnnnnnnnnnnnnnnnnnnnnnnnnnnnnnnnnnnnnnnnnnnnnnnnnnnnnnnnnnnnnnnnnnnnnnnnnnnnnnnnnnnnnnnnnnnnnnnnnnnnnnnnnnnnnnnnnnnnnnnnnnnnnnnnnnnnnnnnnnnnnnnnnnnnnnnnnnnnnnnnnnnnnnnnnnnnnnnnnnnnnnnnnnnnnnnnnnnnnnnnnnnnnnnnnnnnnnnnnnnnnnnnnnnnnnnnnnnnnnnnnnnnnnnnnnnnnnnnnnnnnnnnnnnnnnnnnnnnnnnnnnnnnnnnnnnnnnnnnnnnnnnnnnnnnnnnnnnnnnnnnnnnnnnnnnnnnnnnnnnnnnnnnnnnnnnnnnnnnnnnnnnnnnnnnnnnnnnnnnnnnnnnnnnnnnnnnnnnnnnnnnnnnnnnnnnnnnnnnnnnnnnnnnnnnnnnnnnnnnnnnnnnnnnnnnnnnnnnnnnnnnnnnnnnnnnnnnnnnnnnnnnnnnnnnnnnnnnnnnnnnnnnnnnnnnnnnnnnnnnnnnnnnnnnnnnnnnnnnnnnnnnnnnnnnnnnnnnnnnnnnnnnnnnnnnnnnnnnnnnnnnnnnnnnnnnnnnnnnnnnnnnnnnnnnnnnnnnnnnnnnnnnnnnnnnnnnnnnnnnnnnnnnnnnnnnnnnnnnnnnnnnnnnnnnnnnnnnnnnnnnnnnnnnnnnnnnnnnnnnnnnnnnnnnnnnnnnnnnnnnnnnnnnnnnnnnnnnnnnnnnnnnnnnnnnnnnnnnnnnnnnnnnnnnnnnnnnnnnnnnnnnnnnnnnnnnnnnnnnnnnnnnnnnnnnnnnnnnnnnnnnnnnnnnnnnnnnnnnnnnnnnnnnnnnnnnnnnnnnnnnnnnnnnnnnnnnnnnnnnnnnnnnnnnnnnnnnnnnnnnnnnnnnnnnnnnnnnnnnnnnnnnnnnnnnnnnnnnnnnnnnnnnnnnnnnnnnnnnnnnnnnnnnnnnnnnnnnnnnataataataattatttatattctacttagtgtttatagttattaaactttttaaaaaaaaacaaatatacactttcaaaaactatattatattaacaatttaattaggaaaatgctagcagacacaaaaactggttaagaaaacaaaatagaaaactattaaaattatacaaaaaaaaaagatcctttctgtttcagataattcttgattttagtaaataaaaaagaacaaatagtaaccaataatcttaaaatattattaaaaattatttaaaaatgtgttgttaatacacccttaacataatttcgaatatattcttaacatgattttaaatgaaaagtttttattattaatttcttacttaatattttaatggcactagtcagaagctctagtaaaaagaaaaaacaacaatacgaaaccgtgttggttcatgagtccagatagcgtagcgtgaacgtgaaacacgcgttgcacgtgctatgttgcgtaagcatgctcatgctgctccccactttaatactgctataatttacagcaaattaaagtatgtagatattgaattaaagtttgagcaaatcaataatgtattccacatttccgctactaaatgctactccttatcacatcaaggataaaagtatgtaatgttttatttttaataactctcaatgatataactaaaattatgtttgcttggagtataattttcgtataaaatactaaaaaaatgtcaatgaaatggtttcaggtgttagtataatttttaagataattattataaataattattgtgacaaataatataaacctataatatatcatgatttatgtttaaatgataatataattttttttacatataaatcatttactctttaaaattttcaattaaaactaattaaaaattggagtgagatgatgcagaccatattggaacacctacacatactccccaacttctgagtcaccaatccttaaaatggacgatgcccgcaaggccacaacgttcatgacattaatgaggatcgatacgacatctcaccattttgatatttttttgtattttttttactttgctatatagtacattttttatagccacagtatatttttttacatattattaaattttttttttagtactatcatttaaatatataattttgaacttttttttcttcatttctatgatatatgattgttaattgtttcatcacagaatatcattcttgcgtttgtattattaatgtcttattagaagaaaaagacatatttataaaatggtatattttcatttcaaagatatcactgtgtttgtactattaatgttttattacaagaaaaagacgtgtttaaatggtatattttcatttcaaatatttccttttcaacatgaagtgatattttacacagaaattcatcatatattttacactttgaataatggccgttcagaaaattgaatagcgacgaattttttagtatatgttaaatccttggtcaattttgaaacattaattgaaagcataatgcacaatttttcgcttccatttacggtatctaaacaaactacattttcagaataatgctcagttctatnnnnnnnnnnnnnnnnnnnnnnnnnnnnnnnnnnnnnnnnnnnnnnnnnnnnnnnnnnnnnnnnnnnnnnnnnnnnnnnnnnnnnnnnnnnnnnnnnnnnnnnnnnnnnnnnnnnnnnnnnnnnnnnnnnnnnnnnnnnnnnnnnnnnnnnnnnnnnnnnnnnnnnnnnnnnnnnnnnnnnnnnnnnnnnnnnnnnnnnnnnnnnnnnnnnnnnnnnnnnnnnnnnnnnnnnnnnnnnnnnnnnnnnnnnnnnnnnnnnnnnnnnnnnnnnnnnnnnnnnnnnnnnnnnnnnnnnnnnnnnnnnnnnnnnnnnnnnnnnnnnnnnnnnnnnnnnnnnnnnnnnnnnnnnnnnnnnnnnnnnnnnnnnnnnnnnnnnnnnnnnnnnnnnnnnnnnnnnnnnnnnnnnnnnnnnnnnnnnnnnnnnnnnnnnnnnnnnnnnnnnnnnnnnnnnnnnnnnnnnnnnnnnnnnnnnnnnnnnnnnnnnnnnnnnnnnnnnnnnnnnnnnnnnnnnnnnnnnnnnnnnnnnnnnnnnnnnnnnnnnnnnnnnnnnnnnnnnnnnnnnnnnnnnnnnnnnnnnnnnnnnnnnnnnnnnnnnnnnnnnnnnnnnnnnnnnnnnnnnnnnnnnnnnnnnnnnnnnnnnnnnnnnnnnnnnnnnnnnnnnnnnnnnnnnnnnnnnnnnnnnnnnnnnnnnnnnnnnnnnnnnnnnnnnnnnnnnnnnnnnnnnnnnnnnnnnnnnnnnnnnnnnnnnnnnnnnnnnnnnnnnnnnnnnnnnnnnnnnnnnnnnnnnnnnnnnnnnnnnnnnnnnnnnnnnnnnnnnnnnnnnnnnnnnnnnnnnnnnnnnnnnnnnnnnnnnnnnnnnnnnnnnnnnnnnnnnnnnnnnnnnnnnnnnnnnnnnnnnnnnnnnnnnnnnnnnnnnnnnnnnnnnnnnnnnnnnnnnnnnnnnnnnnnnnnnnnnnnnnnnnnnnnnnnnnnnnnnnnnnnnnnnnnnnnnnnnnnnnnnnnnnnnnnnnnnnnnnnnnnnnnnnnnnnnnnnnnnnnnnnnnnnnnnnnnnnnnnnnnnnnnnnnnnnnnnnnnnnnnnnnnnnnnnnnnnnnnnnnnnnnnnnnnnnnnnnnnnnnnnnnnnnnnnnnnnnnnnnnnnnnnnnnnnnnnnnnnnnnnnnnnnnnnnnnnnnnnnnnnnnnnnnnnnnnnnnnnnnnnnnnnnnnnnnnnnnnnnnnnnnnnnnnnnnnnnnnnnnnnnnnnnnnnnnnnnnnnnnnnnnnnnnnnnnnnnnnnnnnnnnnnnnnnnnnnnnnnnnnnnnnnnnnnnnnnnnnnnnnnnnnnnnnnnnnnnnnnnnnnnnnnnnnnnnnnnnnnnnnnnnnnnnnnnnnnnnnnnnnnnnnnnnnnnnnnnnnnnnnnnnnnnnnnnnnnnnnnnnnnnnnnnnnnnnnnnnnnnnnnnnnnnnnnnnnnnnnnnnnnnnnnnnnnnnnnnnnnnnnnnnnnnnnnnnnnnnnnnnnnnnnnnnnnnnnnnnnnnnnnnnnnnnnnnnnnnnnnnnnnnnnnnnnnnnnnnnnnnnnnnnnnnnnnnnnnnnnnnnnnnnnnnnnnnnnnnnnnnnnnnnnnnnnnnnnnnnnnnnnnnnnnnnnnnnnnnnnnnnnnnnnnnnnnnnnnnnnnnnnnnnnnnnnnnnnnnnnnnnnnnnnnnnnnnnnnnnnnnnnnnnnnnnnnnnnnnnnnnnnnnnnnnnnnnnnnnnnnnnnnnnnnnnnnnnnnnnnnnnnnnnnnnnnnnnnnnnnnnnnnnnnnnnnnnnnnnnnnnnnnnnnnnnnnnnnnnnnnnnnnnnnnnnnnnnnnnnnnnnnnnnnnnnnnnnnnnnnnnnnnnnnnnnnnnnnnnnnnnnnnnnnnnnnnnnnnnnnnnnnnnnnnnnnnnnnnnnnnnnnnnnnnnnnnnnnnnnnnnnnnnnnnnnnnnnnnnnnnnnnnnnnnnnnnnnnnnnnnnnnnnnnnnnnnnnnnnnnnnnnnnnnnnnnnnnnnnnnnnnnnnnnnnnnnnnnnnnnnnnnnnnnnnnnnnnnnnnnnnnnnnnnnnnnnnnnnnnnnnnnnnnnnnnnnnnnnnnnnnnnnnnnnnnnnnnnnnnnnnnnnnnnnnnnnnnnnnnnnnnnnnnnnnnnnnnnnnnnnnnnnnnnnnnnnnnnnnnnnnnnnnnnnnnnnnnnnnnnnnnnnnnnnnnnnnnnnnnnnacactgaatatctcacttatacgacttaataattttatgaaaaatacaaaattaaataatctaatcattatattaatttttataaaatatattaaaggataaatattcatttcatccttaaatatgtagagagttgacaaatttgtctctaaaagatgaaaatttaaatttttgtccataaaattaaaaatgtgtgacaaatttatccctctgttaactttcctccgttaccgttaattgaaaaagtctaagtgacacattcaaggataaatttgtcaactttttacactttcagggatgaatttgtcagctctcgacccaaaatataatttaatcttcatatttttccttttttaatcattacaagcataaaattataataaacacttaaaaaatagaaaaataaatataagttaaaacaaacataataataaacataatattgattaataaacataatttgtttttttttctgaaatttctattgtaacaatattaagtaatgacaaaatcaagttctgaaattaatgacataacgattgtgcattttttgtttgagtatcatattttgggtaaggtactctcacaatagaaatttcaaagcaaaaatatgagacaataccttacccaaaatatgagagtcaaacaaattaaaatgcacagtcattaaattaatccttacaataaaaaaatgagatacaacttgattttgtcattatctaatgttgttacaatataaattttagaataacaaaaaaattatgcttattaattaatattatacttattattatttttgttttaacttatgtttgttattctaatttttaagtgtttattataattttatatttgtaatgattaaaaaagggagaatatgaaattaaattatatcttgaatagagagctgagtaatggacagaagttaatgaattgataaatttgtcatatttttttctgtttcagggacaaaaattgaattttcatcttttagaaataaatttgtcagcgctccacacatttaaggacaaaaataactatttatcttatattaaatttataaaaaaaaatcatgttaattagaaactagatgataattcatcgtaataattaaaacaagtgatggtaaatgttatagaatttttaaaaaatgctatattgaaaatttgaaatttaaaaaaatatcggagtaagctgaaaggttaaacctgacacgtgtttggcacattccctgtgccatgtaagttggagaggggacagacaggtaattccacaacagtaactgccaccttacttcgtcacctgtctttcggaacctgaaatcacgaaaccaccctccacactttctcaaaataccaaatacgccccttcggtataataagaatcccaaatccgtacctcacaagcgaacgcgaagcagagagagagagagagagagagagagagagagagagaagagagagagagaagagccgccctttcttacaataaacaacaactcattctttcaaggcttcaacaacagaaactttcatagtttttcactccttctccctgtgtcggtgtgctcttcttctggggcattcgttttttgcttcttcagctccaacttcaaacgtgcttttggtggaagaagcttcactgggatcactatggtgggtgtgtgagagagggattacggattagtgagtttttgtcactaagagctatgtcatttcatgatcgaggggtggtagcagtttggtgttgggattgaaggtggggctttatttggattctgtgtttgttgaaggagctggggtaggtggggcaaatgtgcttgagtttttttttatgccaaaattgaagcttacctttctatgaatttcttctgtttcgtattggtggcttaatttggagtagctgttgcctcagaatgcagcaagatcaaagaaaaaaggtgaatttgttgtttgttttcctcatttccaagcatgactctaattaattgctatacaaatcattactttttcaagtttttctctgtcccgaatgaattatgaaggtgccctttttgggactaagctgagtttaaccgaatgaattataaaaataaaatcttgtcttgtttagtgttggtgggttactacttgctaccgagaattttagattacataagtcaaagtgtgggagtgaggttctgttaagttggttccatggggctgtgttatgatgttagttagctctctctcaatgtttaatccatcacgtgacataatttatttcccccacgtgacatttggttgacaagatctttatttttttcaccatttttttgggggggtataatgtgttgatgaaatttgcataacgcttctttgaactgggtagatggcattcctagggttgatcttccatcccaatcaacccacccttttgcttttctttgtttctacgtattctgagatgtgtcttgcacgctttaggtgcgttttacgagattgactctccgaaataaacgttggtgaatgacaagaagtgatgatttggcgaagaaaaaaaatattcgtcttaaaatgaatattggtttgtcataagaattgtgatgtgttgagtggttttaagtgctgtattttccccttcttttgggctttgttaagctggggagtgaagcgttgtatggtgacaatgtgtttctttatgtttattatttgttatttttcttgtgttagtccaatctatgcagacatgatcagattactgcaaatataatttctactctctttctttgagtctatgattcttcaatactgagtttcataatgtaaattctattgcacacacaaattttgtgttgtgtgtattaagcttatggatggatcatggattccgagatataaattaattttccttgtaacatagcaaagaaaaattatttattactttaatttctatttatcactttaatttctatttatcaattatgaaaatttgtttcccaattggtgctttagcttgatttattatttgtagacaatcaaatttgggcttgcctgattttcctttgcggattactttaatatctttggtacagggctcaatggagatggaatttttctccgactatggcaatgtcagcaggtacaaaattcaagaggtcattggaaaaggaagctatggtgttgtttgttcagctatcgacactcatactggcgaaaaagtagcaattaaaaagattcatgatatctttgagcatgtatctgatgctgcacgtattctgcgtgagataaagttgcttagacttcttcgacatcctgatattgttgaaattaagcatgttatgctgcctccttctaggagggactttaaagatatttatgttgtttttgagctcatggagtctgatctgcatcaagtcattaaagccaatgatgacctaacaaaagagcactatcaattttttctttaccagttacttcgagcattgaagtatattcactccggtattcttcaatatttgatagtttacttgttcatgaatatcttctttgaatgcgcattgtgttgctagtggctatagcttgttttctctctacaatgacatgtaattgaaattgtgtcattccttagcatttttcttacaaggatgtctggatcatctatatttttttctctaactattgctgttgttgacttttttttgcacctcattcctggatctccttaaacttgtatagttcttttatggttttgccaaaatgttttacttattcatttgtcctttttatattttactttgtctatttatcaacataaggttgctggcatcaatgtcaatattgctcaccaattacatttcaacacattgcagcaaatgtctatcatcgagacttgaagccaaagaatatactggccaatgcaaactgtaaacttaaaatatgtgattttgggttagctagagttgctttcaatgacacaccaacaactgtgttttggacggtattccatcccaacattttctctgtttgtttcataccttttcaacagctttgctagattttttgctccctcatatcaaaagtattggtaacataggggctgatgttttcttgcatacttaatacttttctataggattatgttgctacaaggtggtatagagcaccagaactctgtggatcattttactcaagggtatggccttttcaagattttcagatatcatataagtggtagagaacctaattatgcataatcttgactcacaccatacctaattcatgctcattagttttgtgtgtagaaattgtatatcaacccatgatacatgctttctgttatcttctttcccatcaatagctaaaagtaagacccaagaccaatctgttatttattcttaatccactggttttctgtttctattagttttattttgtgtctgctgatgagctaacggtaaggtattgactgcagtatactccagcaattgacatttggagtataggttgcatctttgctgaagtattaataggaaagcctcttttccctggaaaacatgttgtccatcagttggatctgatgacagatttgcttggcactccctcgctggatactatatccaaggtagtttctttttttctctatagagggaaaactgtttgtattttcttaactaagttttactaacatcattgtttggctggtttacaattttgaatctttgtgttggatgcaggtacgcaatgataaggcacggagatacctaactagtatgaggaaaaagcagcctataccatttgcacaaaaatttcctaatgcagaccctttagcactacgactactggaaaggttgctcgcctttgatccaaaagaccggcctactgctgaagaggtttttatattgttctctatttcttatgtatgtgtgtgtgttgaaaaattattctactcagataattaactgcttcttgagcttatgctttttctttggagtttggacaatagaaatgtataattgatgtgcaacaatatgtgacttccttgctttagaattctgaaggatttgacattttcaggcattagctgatccttacttcaagggactttcaaagattgagagggaaccgtcctgccagcctattacaaaaatggagtttgaattcgaaaggagaagagtcacaaaggaagaaattggagagttaattttccgtgagattctagagtaccatcctcaactattgaaagactacataagtggaacagagagaactaattttctttacccaaggtttttatttttggtttatcgatttatacttcaactgtttatcttcttttccttaatattttttattcatatgttctaccctattattctctccttacccttcattggtgcatattcttcacagtgctgttgatcagttcaaacagcagtttgctcatctcgaggaaaatagtggtaaaagttgtcctattatgccacttgaaagaaagcatgtatcacttcccaggtaattcactaatgtagtatctcattggtttcacttgtcattggttgtaatcataggttgttaacaataggttactttgattatattatatttaagatatctattcattagatataactggttttttaaaacaataaccggttatatcaaatcataacaggttgtacaaaattggttttggttatggttatgataacaacttgtaatctggttatttagtagttatggttgtggttacttgaataaccaaatcatgaacaacactaggcataactcaatcccacaaaactcacttgtaaggtgaggattatccaaacttcataacctattttaacatcatatctctagtcgatactaaatacaccccctcaaagctgcaattaatgcagcccaaagaggttgcaactaaggcacagctcagagaagccgcaattaaggcaggtcaaggatgaccgcaattaaggtgactttccaacagtttttacatagcataatacagtatcaaagtggtgtttacaccttgtagtcaaatgttgagatcttacatcgactagagacgtggatgtgaagtctaagggttgcatatacccttcacttcaaacccgctgttgatatttatttgagccatggtttatattgctgctaattactttctatgtgccctttttcttaattcatacctcctgctaacccgagcgagcattcaaatatttgtcctacagtcattagggaaggtacccctagtggattgaagaccatatcaacgtgtcttccatcttgcaaataaggcatatcctgtctagacaaattttttgaaacgataccttcatttccatgtcccccagccacttaatctcctactttaatttcacgtttctgtaaaatatatatacgaatcccaccatcctatttatctgctctttgaatgtctcagcatggcatgagatcaaatcgaccaaaataatccacatcttctccaggctgcatttgctgttacaactgtttcattcatagggagcctaatcagattacatcatactgaactttttgtttgtttgctttcctcttttttggaatcattgacaggtcaacaattgtacattcaaatatagtaccctcgaaagagcaatcaaacattacttcctgcataaaccagcaaacaactgaggaaaataataataattccagggatacagaaagtcctgcgccaaggtctattcagggtctgcaaaaatttccacaaggtatgtgactgttatcaattatcatcatgcctttgttaagtttgtatgcattattagtaatgaataagctaacattcttgtgttcagcaaaacctggaaaagttgttgggccagtgattccatacgaatatgcaagtgttgtcaagggtacatatgatccaaggacatttatgagaggttctgttcttccttctcaacctatgccccctacgaatcattatcaaagatcaacctctggaaaacaagaaaggtcagcaacagaagctgacaaggtgcctttacaatccaaacttgctcagcaatgtggtgtgaatgccaaaatagcaccagacatagctataaatattgacaccaacccttttttcatgacacgagcaggagtgaacaagatagagcaggatgaccgaatagccattgaaacgaagttgctgcagtcaaaggctcatcaatatggtgggattagtaccactgctcatagaaaggttggacctgttcagtatggcatgacaaggttgttctagaagaatgttgtattgtgaatagtttggccagttggagcaatacttgtggagaataagaaaaggttcttcatagtggagaagcagtagtctctggtggtgctttgtgtaagacgatgatgatgacaggagttagtgcttccccagaaagagccagctttctctggtcaaaccttgtaaacattggtttcagttatcaataaattgtacaaccgaatttgagtcctatcttgtaattcaatccacacattcctttgctcaggatatatatttttttaaaatttcctgcaataactattttccaagtagaaataaataaatcagaccggtacatgtactgctatacgagtaaaaatgtggaaaatgtaaagtgttttatgcgtgttatacacaccggacgcaaaggagtttcattgtttaaccatagtgttttaaccccctttggccatcatagaaacagattcctcacaagtttctttaacaactggattccatttaaaattatatcaaatggttcaaatgctaccaaattttcctcacctaggcacagtaacaatttatccttgaaagtaggtttggtgcttgcataatttccttctatttatgttttttttttttattttgaaagaagaaaaatagacacctcattgttttattggaatcaaaccccaaacaaatagtttgagcattggatcgaatacgacgtcacagtatttcatatgattttgaaaatttgaacggacatgtgcccaccttctcccctcatggagccacattggccttccatgtggaggaggttactgcagctaccttttggaagctctatctaatagctagctatacaggataagattaactttatgtggagacttgctttcagaatgtacaaccacttgtaagttgtaactcttggatttttctacttcttacttccgaatagttaaaatgctaatggtggaatgtgtgatgcaaagagacttgtttaggttgttactaatctatcagaaaacctggtgaaacagtcttgtcagaataatgttgcattgcaatttgcagcccacataatagaatcgaagataataaaaaaaaggaggaaaaaaagagccactagatgcttggctctaaaatgtactgtaacattgttgatttacattaatcattaatttaatgtcatacattaaaaacataaaaaagaatgacctagaaaatgaggtaaatccgaaattgagataatgcatttgaatgatctggtcgcttgtttattgtttggcatttactgcatatgtaagctgcagacaacgcggggctcaccaataaaagtctgagtcagttcatgtgctgatcattaagttgttattatcaggttgagaaaaatcctcattcctccctctctacaagaccaactgtgaatattcctcaccagctgcatgcatttatttttccttttcctttttctaaacctaattgctgatattgttgcaataagttttgctccagtgattttttttttttttccatttacctacgcttcctaaaaatggatgctaaaacttccctttccttgtttgaacctttgtggtgccatcatgcatgcctagttcatttatattcatagaattttctttaattaaagatgattaattcaatgtttggttatcatcattcacaatatgattaaataagtcaaatgttatcaacatgggttaggtctatagagaaggattagtatcttataatgtgacgaatcaaagtttaagttttcaatgtttactatctgaccacgattctttaagtaagatcgtttctaacaaaaataaatgtgattagaaaaaagttaagtgttagttaatattcatgattaaacatgttaaacatttattatgtgtattcttttatgttttatatatctatgtcctcgtgacctactaggaggggaaataatggaaacatgccattaggtatccctagaggcctaccatgtgagagcttcatttgtttgcaccgtaagatgattttggagatgttaataagtccaaaggatgaatagataaaggaaaaaggtctgttaaaaaattgtgaacagaaacaaaactcaggtaggatgtggacacacttgcagttagattagatgtatgacattgaattataatagctctctcatcaatgatatatgtgccaagcaaagcaaggcccctatgtagcaaattgatttcaattttcgtacaagaaatggtggtacggaccccattaccctccagaacaaaattaaaaaaaaaggaaaaagagttatgaaggattgaaaaaaagggtagtgtagtgtgtgaatgtgacaaaaacagagggatccgagtgggtctgagcacatggagtcccatatgcccaacacaaccaaatctctcatacaatcccaatgacccaatccgccgattggtttccttcttggaaacaccaccacctcccctctctcaactcactatgatgtaatgcatcaatcttcttttcactctcttatgagtatcatcacacttacaacaccatctagtttctcaattttttaatctaccatttttatcttataatgttgtgtataatttattcttaccagtatttcttaatgaattgaatgcttatataatgatattataaaataattttataatttcatataatgatacattattatttaaattactttaacataattattttaaaagttgataaatttattatatattataaattatgattgaattattgtgtgtatatttttacattttcaatgtataaccgtttacctgtttcttaattatataaattaaatacaaataataaacggctataaaaaaattgtattctttctctctctctctctctctcattttggtgaaaaatagttagtataatttactttcttacaaatatctcaagctttcatcatcgttcacttttttcgtccttttatttatgttttctttatcttttactcacgatcaataatttttgtttttaagaacatattctttaacacacatctttaaacacatcctctttaattaatataaaattattaaaaactataaaattagaaaaataataattaaatgtagtatgagactcacaaaatctaaatatttttaattaattttaactaattaaaaaaaaagtgttcaaaagaatgtaataaagaacgtctttctattatttatctctctctctctctctctctctttttttacatagtgactcgatttttgtttttgtgtgttctgttaaatttatcatctgtgcaacattttttttattgaaaaccattcaaggcagttgatacctttcatttcagattattgatttttttttacaggcatttattattatggatacgacataataaatcatttaataaacatattgtagtcatgtttcttctgttttctctttaattaagggagtggcgtatttttatacgaaaatgccacttaaatgcgaacttaacttgtttatccagaaaaccaacttgtcctaaataagctaagcaaggagtatttgatttccttaaaatgccaagttgttagtttaatagggttgggattgatatgattctagcaatttacatgattaatttggcctaaaagggttagaagggggggttttgtggggctcaaggtggggtcattggaaagtaaacacgtggcagtcatgcgaaggatcgtgatggagatcacatggcatatgaatgaaagagaagagagtggagaggcacatgggtgggtgttaagttcaaggaattcatgtgagcacatgtgctttctcccctttgttttgtgtcctgtgggaccattttttatgctctcaccccttaacggggttgcatttgcattttgcagtcacttgtaaactttatactttcacctttactctccaaaatcctcttttgaatcttactagttaagaatccttaaaatctaatgcccatacatattttatagactattaacaagatgcatgtgtttagcatgctataattgatcataaatatccctttagtgcatctaagatgccactttcctatgatcttgcaacaccctctaaaagctatggaaatagtaattgtttgattccttaaaaaaaaattagtttaacatatttttattaataattattagaatactatgatatttttattccaacctccaaggaaggaaataataagcaatgaaaaagtaacgtaatactttaatttcattataaattttttattctataaccttattaaaaacatttttaatataacttctaaaataattattataaagataaaatttagatacaaatctataagtgttatttgctttttttataatcaaaattaaagtttcacttctataattcttgtaacaaaggattatgcattagataaaatttagatgcgggttcttttaagtttttctttcggtaatacaaagtaatatttaataaaattctttattatgcacattatcgaaattaaactctaagttgataaaaaaaaaacaacatcaacagtatttatgatattgcatttagattttgtttattatgaagacaaaatcattataaattttgaatttattataaaaataaacaaatttatcatataaaactattagtgacaagataagaaagtagaaaaataacttcacaaagataaacaaatttagaagggggagggtaaaaaaattgatgaggggtgttgatgtggagcgtgaaggccacctcatcgctccaatccaaaacttggggggcttcttcttcttcttctttgtgttgtgaggccaaaaccagtgggaccagcttcgttggcattgacatttctagagctcaacaataatttaacatcttcctccttccctccctccttcgcacacaagacaatcacacctcatataactccctcacacattaatctcccttctctctctctctctctctctctctctcacacacacacacacacacacacacacacacacacacacacaccaaattagtactataactacatgtcatcaccatcatccatggaacaagaagataacactatcatacccacattcctcagaaaacctgcagaagaccagaacaacgacaactctcccaccccttctcacaagtctttgcatgttttccgccgcagcaggaggcggtggaggaaggaagtggcagtgaaagatgctgtgaaagaagaagatgaagaaaaagaagaaggagaagatgagggtgatgaaagagaagatatagagaggaagattcatgcattacagaggattgtgcctggtggtgagtctttaggtgtggacaagctctttgatgaaactgctggctatattcttgctttgcagtaccaagtcaaagccttgagggctctcactggtttctttgagaagttggagaaggagaagacaaagtttggaggttgatggtgaacatcaacatgagatgatgaatgaatgaatgaataatccatggtgatgatgatggattatggaagcaagcagcttaggttaggtccttttggtttttcccacagaccccattagttagaaattttttttttcttcttttaatttttatgttttgctttgatgtacttttggaagttgggatcaaggaaaatgtttatcccatgatcgatgttcttagatttttaattttttaatttttttttaatttttaattttgaagttctcatcagttctttctttctttttcacagtgttattttttttccatgactttatctatatatcttcttgaaagttgatatattcatacgccgcagattaatgttacagaaggagttattgactttaggcaactgttgtaggaatcttattaacctgtttcatgatctggagtggagtaaagttagagtagatgcaagtgtatgacacattatggtgtggcttcgatgtacgtgggctgtgacagggttcatttttagttcatcttggtccagtgggccacccctattgggtcttgaaatctggatgagatcagacgttttataaagtaacatggcacatacacatgttgtcattggtcactttctctcttattttgttgtgaaaactttgctttggagattttggaatagggttgtttgacttttttggcagttagccattactaccacgataacttagacttagaatgcggtatacagaaagaaaaaagacagcacctctcccacttgaagggttgtaaatttcacatggcttctttctcatccgaggataacatgatcttccataatttaaggtaaaaaggaatacattggcgatgatagtgttagccgaatcattgtacagccattaatttgttggagatgcatcactcttaaccttcttgattcttaccctgtgcatgtatttcaaagatggaacatagcttacaaataacaacaagagtcactaactttaatatgtttgcctgcatttttagtggtaggaaaagcagctcactttctttcaaagttaacaatcactgcttaaaaaagaaaaaaatgtattcaatcagtaaaattgatacaacacaaaaagttgtttcctttaattttagaatatattgtacatatatagtatcatatataatgtcaaattttctatgtttaaatacattaattttattaaaaatgaaagaaatgcatgtaaaaaattgtgggcataataataaatactatctttagtcttattcatacaaaataagtgattatataaaatatattatcacttattttttataaataggactaaaggtataatgagataaaatcaaggttgttatgagcaatgtaattactattacaccgatgaaatgaccatttaaaggtcattttttagttaattattatttagagattcgttttgaattattatcaaaaaagaaataagtcataatatatgttatgacttttgaattaaaaattgtaatcgatattattgtttctacttaaaaaaaatacgactttaaaattataggaataattttttttaagtcgtaacgacttcaataatatcaaatgtgactttgagttcaaaagtcatgttacaacttattttggagaaatttacaaaggcactcccactacagtcactattttggagatccaacagaacaccacactctggcaatcaaattccagcatgcttttgctgaaacaacccatctgcattctccaattgaaaacttcctggaacagtcacagtcacaatcacagccccagccaccacaaattttttgagacccagaaattaacttgggcgtgtgacattgtgaatgtgaacaacaacaatatgtatccatcatagcacataaagcatgcatgcagcatcaacattcaacattgacaacatgtatgagttatctaacttctaggtggctgactattactgatctacataaccaccaaatttatctccaaagagtgcatatatatatatatataataaccaccaccagtattgtaacgccacattcactgatgaaacaacattataatgctcatgtacaattcaaaggaattgccaggcaggggagaaatttacacacatctcttcttatatgatgttagtgccacttcatctacagaatagacttctgataccaaaatcatgttaacggtaatttttaattaaataataatataaaactattttatattatcaatatatcaattactaacatgttcttatgtaattttgtatttaaaaattaaattattataaaatataataaacttaagcattaattatttatgctttaaatacaaacagtactcctgttgaatgtatagaaaaattatcaggtacaaaataataattaaaagagaaacattaattttttaaaaatcaagtgatatatcattttaacaaaaatgatggagaatgaggttaaaaaacaagacaaataatttttgttttggttactaaggagggctgaagcccccattttttttaataaaaaatcttacgtgataggttgcaataaatataaaaccattccttggatgcactcaatatatgttggataacctggagtggatactcgagacctcttgggctggggatgaaatagtcgcagaagtagaggaataagtccaatttatatttactattttatattagaattagttttcttatatggcataaatatttataaattcaaataaaatacaagtaaaacctaaaaaatatttaaaatgatataaataatatttattaaaattaaaaaattaactaaaaaatttccatttattagcacacaaaaatttcaaacgttagaattactcctgtatatagttattattgtctttttttattttaaatttcgtaatatagttgttctcgaacaaaaatttaaccgtttgaacaaatattgcaagtctatattaatatatagtaagatgtattaaaaagaaaatactacaagaaaataagaaaagatcacacaaattgatttatcgtagttacctcatacttacacctataatcttgttacatgatctctagacaaaacttaaactctcccttcaaatgtttgtggccctttctccacttagagtggtgtctcagctccctcttaaggtttagtggatttttttatctcaataactcctattagatatgagaaaattttcttctcttaaatagttaatttctttagaattttttttactctcatgtcttaatgtgactctatagtatattgattgatatagttcttagtgatttttattattgtattttgaaatagaattctatagttcttagtattgagtataactatcatttactactttggtcccgttgaaataatttgtcaaactctgtcattgatcacatttcttctcttctcgccaccaccttcacctaacctttctcccattctttttctagccatcactttcatctcctttattttttactttatgtgtttctctatgtaaccttctctttgactctatttttcccccatcacatttcttcctttcaactgaacttgttactaccatcttttgcaattgtatccaaactaaagttacttaggcaacacttccctactcaaatttgttgttttttttatgaggtcttctacagaacactactttactcaggttagttatgacttattttgggccaactcagtttgaattgttgttggacaagtgtcgttatataagaaataacaaaacaaaagaaataagagtagaaaatcttagactctattaaggtttgtttgtaatgggaggatgtgattatcatgcatgttttgttgtgttcatagtttgctaatatgtttatctatttagctttgagcgtgtttgatttgctaacgtatatttgttgtacacttctttagcatcctatatatactcttgtaagtgtctttggacattttcaactaatgatcatttggaaaaaaaaagaaaaagcagtggctattgtgagttgcatgtcatttgtccctttctaagctaacctttcacaagtatttgcacttaaaagagggttcaaggtgctaatcttgttacaaatattagttgagaggtattggcaaaggaatgcaaatttcaatctctaaattgatacaattaatctacccaaatgattttaggcatgctttaccttcttaccttatgggtggtgattgttatcgtattatgtttaagaaacatgtgtggttgattgcccaagttattaacaatctctatcgagttaagtttgcatatattgcatgattgataattgttactttgttttgtatgtctatttatatcatgatattttaaaatgtgagatattgtgtatgctattagtataataatatatgaagtaaataataatttgatttctccctctttatatatatatatatatataattatatgattttcttttaatgagctttcccttgtatgttttctttttgtttgaatgttttaacgagcttaatcttgtattctttaaagatatactattatgtagaaatcaaattgaggtcattctctacaatctcaaggtccacccattataagttgtttttagttttatttatttattattgattattgattgatacatgacatatataaacaaatggtgtaacattcttatgctaaatatctctgtgttggaatttggaagtgttttcaattccgaacataaaaaatgaaaatggaattacccgatcgaatttgacatgctggcgcacacatcacggagaacataatttcaaatctgaaccgtcggttgattctgatcgcactttctgagcacttccttttgtgaaggaaaaggtgaaaacgaaaatggtaaagttttaaagatatttttgacgcacactacaccactcaaaaccctagtgacacccatttcataaaacgaagctcttccttcctttgtcactttcccggaaaatcctccccatttttcctggaaaatttatcttccgttttctctctgacaccaccgcacactcttcacaccttctctcactctgtactgtccttaccttactcttgctctttgcttcataagaatgtacctcaacaattatttattcattttttttttttgtttacttccgtgtataatttgattcacggaccgttaatcagctacttcgagcttataattacaatccattttcattttttgtttattttattttccgcggtgcaattcgatttcgatttctggcttaattaaccgctttcagtgtttgcgttttttcgttgtttggcagaatcaaccatggcggacgaaggtgttgccaatggcggcggcgtcgacgatcagtacggcgaggaatcggcgactaagatcgtggcgttgcaacgcgagtgcgacgaattggtgagcgaaaacgtggcgaggaaagaggagatcaagaagctgacggcggagctcgacggattgaggagcgacggtgcagataaaagcgagaagatcgaagagctgcagagagaagtggcacagtcgcgtgatgctgcgaaagcaacggaggttatcgccgcgagggcggcggacctggagacggaggtggcgaggctgcaccacgatatggtatcagaaatgactgcggcggaggaggcgagggcggatgccgccgaattgaggaaggttttgggggagaaagagtctagggttgagtctctggaaaaggaattggcaggattgaagaaggtgaaggctgagagtgaggttagggttagggatttggagaggaaaattggagttttggagactaaggaaattgaggaaaggaacaagaggattaggtttgaggaggagaccagggataagattgatgaaaaggagagggaaattaagggttacagacagaaggttgaggaattggagaaggttactgcagagaaaaaaactgaattggatgagtcggttaagcataaattgaggttggaggaggcacttagagaatctgaggagaaagtgactggtctggaattgagtattcttcaattgcgcaaggaagcaaaggaagctgagagggtgatcatatcgctgaatgagaaggcggtggagaccgttgagtcaatcgatagaggtttaaacagtgtacacggtgaagggaagggattgaagttgcagtggccagtggtggcagcagggtctacaggagctattgttgcagctgctgctgtaatctacgtgtgctatggaaaacggagctgattttctgtctcatcggagagtgatcaaggagcgaggggaatttgaactggaggaggttctagaggttagacttaccaggtctttagtagtcatagatatgctgctgcaattttgtttgttacaaaataatgcttcttctctggcttttgtttctgaagcctgttgattttttgctcatgtcgaagttggcatactacttttttggttgttagttgcttattatgaggatcaaaccattgtgtgttggatttaataaataggttgcaaaattgagattacttgtttctttgtgtttagtttgacccttgttagcttggaggataaacaatggcactgctgttagtttaaggcggcacttggtatcacctcttgtcaagctattctgtttctaaagttggtttctgcatccatgttctttttcacagcatggctttgaatatagaacccacctggtgaattaattgatgtttcaggattagatgatatcactgatttattgttgttgttgttattgactttttgtcttgcaatgtggtcagagagagatgatttttcgggtcttgttatttttttcttcccatgcttatatcccatttgtcgtaattgtattcagaagaatttgtatttggttgaatgtttttttcagttgtagttgtaggtggtgggtttggagtttgaaagcgttggcttgcattgcatccctttctttccaccttttaatagtttctgttaagttgactagtactattaaccttttgctttaatttaaagagacacaagggtctatttcgtgaatttgtagatcaattgtcaaacaagtagtgtcgactgctgtgctaacgtttggatagttactattactaagctattgctgacataacttgatagatactaagctattgtttaactgcttaggaggcgaaatttcgtgaagctgtagcatttttgttggaatttttctttcgtttcttcagtgaggcacaaagaattttttgtggttttccaacttcaatttttattatcatcgaatccacttaatgcgttaatgttgtttatacgcgaagaaagtctgtttatataaaatccccttaatctttaatttgattctgatgtgtaaaaatctctactattgtacaatattggaaggacccggcgtgagctgcaaccctttatgattccctgccctataaaaatgaacaccaaattcaacaaaatgatttattatcggttagaaaaatggttcctgctttaaagagcttacgttttatcttgtttaaaattaaaggtgaaggctcaatcaagtaataactggcttaaactttttttggtactacataataacttgcttaaatataaaatgaaattgatttttttcaaggcgaactaaaaagtcaatttcccaaaagaataaaaaagaaaaattagccactgtaagttgcatgatattcaggtagaaatagcttttaccgagcacacatgtagtatggcatctatttttgtagggtcattactcattaccagtgtcacttttgtaaaatcagagtgcatcagctttcatttaaaaataaattatccttaattttcagctttggatttgtaagactgtgtggtaagcaaaaagcgttgtagctacgcggtgtcagcctttaatttttgggcccaacacctggtaaggatagatcttatcaggaagagaacctttcacttgcacttcgtttagatggctgacaatagggaagaaaataaagagagaaacaagataaaattttcaattttgttgtttattcgagaggagaaatagatagatgtttctaagcatttcacacactaaaaacttatagtgtttaagcatataatttaacagctaattttactactaatttttaattcaataatagcataacaatcagttaaaagtttctagctataaaaattaatttttcaacatctaactaattaactatttgaccaaatttaatagtaaagtttgttacaacttcaaagctattacagtatgggctatgttccatttctaaagctatgatcaaactttataggttatattttcgttgtgtatctagttgagatacataacggaaatatgcttccattacatatgccattaaaaaaaaaaaaacttaccccaaagctcgagtgagatgcgatgactgaagaggaaagggataggaagtggggaatggagaagaaggacaagtgtgacagaattgtgcaagagcaaaagagtttgagaaggagaggaatgaggtgttgggaagtaggggaaagaagtttaaaagagtttaggttatggagggattaaagagaataaaacatgagaacgtaaaaaagtcatgaataacgtaattatatgtattttaataaaatttttaaatttttttaaccaatatcctaaaatactattagtgtttataaaaaaggagttaagaataacaatttctataagtatttgtgtttcttagatagtcatgctccaaacattcccttcctctctcaaccatcattaatggaatgtgctgatcgtcaaccaaacatgggacagcttaaatcatcctttgaatgtatcatttcaaagcaatggccctttttctttggtttttgtagttcatttgtttagcccttggcctttatgataaaagacatttattttttttgataaactatgataaaaggcatttctatctctatacagaagaagaatgaaatgacacatgagcttacttcgtatagatcataataacgtggtgattgtaaaataacttttgataataaattctagttcatggaagtttacaatatgccacaactaaaatgtaccataccatacattttgtcatttttgaaatgaaacaatgtaaccaatctgattctgaaacgaagcaggaaagcaaaccagaacatgccccttaatttgaggctcaatgaatgcacgcaggacagattttgtctgaaagggcaccctcacagcctatgattgtgcaatgcctcagtaaccttagctcaaggttcaaccttctacgatgctctgccctataatattgaaaaatcaaataacgattcacaacttagaaaattgccccaaagcaaagctaattaattttgacagatgatcagatacttaaatttgactattgacaatcttcaggtcaagaagatcgaatcagttttactacaagtgttttcttaaagacaaatgctaaagtactgtattaaggacatttgttaagaaatttaaaataaaaatacttttattaaaaatgaaaaattatgttatttatatttttttttatgtttttctattatttatataataaatactttcttattttaatttttaaccaatattttaatagatcctttcttaaaatatcatctcagtatttagaaatttgacatgacttgggcttttgactcttgaggagcatcagtgattataacgcatatatcaatatcccttgaaataattgttgaaatcaataaaccacattagtacgttgctgccaaattgcacctaaagtactattgaatttgtctgtggtcactaaagatttcagaaccgaagtcttggccaaatatgtttaattactacgtagtatcggtataaaattattaattaatcataaattattattaatgtaatattttaaaaaattattataaaattaataaattattatatatgatattttgtaattgaataatagtataaaattattttagagtttccaccctcaatgcattcagtcaaaagtataagtgataaccaccaatgtaaccatattgacctaaaatgcatgctagattgtattcatcaccattcatcagtaagcatgataaaatttcaggcaaatattttcaattcttttcttgtttagaggaggtactttcattactaatatgtgtaggtaattgatacacagttggactcgtacttctgttcaacactgacaattgaggctgcttcgcatcaagtttttatttgcataacagcttatcattctccttgcaatgtccaaataatttgaaaagccactaattaacgtcatattttgaagctaaggtaatcaaaacaattttctgatacttaaatcgaagcaattttaatccttgttttaccgacagtttcaaagggagttgtaaagttttgtttgagaaagcacaacagctctaaagcgttgttatttccatatcatacttttttttttcaaacttaacaagacaaaaagcaataaaaagattctgatgccaactagagtattctctttagtggattacgcaaagtcttaaaataaggaaaatgtataatttgtttgccgagggtctccaagtcaaaccgtgaaatatttccattaggtttatatgttattatagtgacacttaatactacttcagacccaattaatatcctatcataattaagctatataccatttaggtatacaatttaattaaattctcattcaagaagttgtacaaagaaaataagtcactttcatgagctgaattaagtttcatattagccctttcaaatatttgattaatcagttatttatcatttattattggtcaaagaaagaataatccttggttgaggtttactcaccttgaattatctatcaccaccactcataatctcaaagagtccgcagcaactcttccaagaggtgttttccctttgagccacaggaacaattgtctgtcacaacaaaaagagtatgatcactacatccataaatgcatataaaattacaaagacaaaccttacaaccaacacttgcttagcacaaactgaaatgtctataggaaattatcataaagtttgaatcacccaccggattttcagtgctttcagcatcaggaacacttggtgatggttgaaaagactccttggcactttcataggatgactcttcttggccacctgatggttcctcaattttctcatccaatgttggctcaaaatccaatgatttctcaattatggttggagcaacctggtcactctcatctgattttagaacacttgtctccacagtttcctctgaagtcacatcagttagaggcaaagaagaatcaccatagacttcatttggttcctcactctctctaagcaacttatctgtcacaactgaagacaaaacattcttctcctctccaccaaacatcatgtgcttaaatgtttcaaccacaacttcagtttctttctgtccctcatttcctgaaactgaaaagagctcattatttctctctgaagaaggcaaatccgtttccttcacctcatcattaaccacagctagatcagatagaaaatctttcccttcctcttccttcaattccaactctactgcatctgattccattgtattctcaacttgaccatctttcacagcatcaggctcaaaagtctcacaaactgattcagaaacatcttcttgtgtcacttcaactttgcctgagtcaaccagctccttattctcctcatttggtggtgcctcttcatcagtgatggaaatatcaccatcttgggaatcatcaacttcaacaaccacctccttatcttctctcaaagtttgtgtttctactttgtggctgtcttgtaatgttccattgagagatccttccattttcttgcagtggtttgctgaaacagctgcccctgcaggtaaaaagaacgacgctatattattctcttcaactaccacaaaataacaaacataatagccttggcaaatgggtgccaaactgccaatgaaccttattctaaaccagttttgtgttaatagttattgaatgaaaaacaggaaaattaacaaaaataagattaaggaaagtaacaataagaaacataggatacccaacaaggatgtacaaagaacagatggacataaagaaaaagaggacacgcaacaaaatgtaggtggccggggaaggtagatagagagtgtagtaaagagtgattaccttggagttgatcagagtgagaagaatggtggttgagaatggtcacagttttgtgtttattggcttgttttggtttccttcttgaagctggaggcatggacgctgactggttgttccagagaatggtggatgaagattggtgttggtgtcaatgccaatggttatagacttatagcagtgtgtgtgtcagtatgtgacttccctttctttctctttctgcttcttctgtttacttatataaagaataagtgcttttaaattgaattgaaacgctcatggagggaactcaagtgatgatgaaacgttaaaaacagttccatctcaacttgaagtatattctgagtgtgcgtgtaacgatgtgtactatgtttggagtacaattttcatctaaagtaaaattccttcaagttgttttaaataaggtgatatatggattgttttgttaccttaaaattttaatttttaagagagtattagtacttttgtgtaccaataaaaaaataattatttatatattaaaatcacatcagaaattaattagcatttaatttcaatggtgttttaaattttataactacacatttttcaaaattttcaaaatattaaatatgaaaaatgtactagtgtaaatggaatgggcaacaaagtaattcaaggcccgtttaacaattacaaaatatcaagatactaaacaataagtcataatatcaattccatattacctataggtaaaagttacaagtacaaattaatgtctattatttattggtctattcaaggtatcaatatcctttaatatatgtaaacaccataaaattttccttaattttgttgttgtgattttccaaaatttattagatgggttaatttgttgtcttcggagtgaaacgttgcaaataaaaaatgcattgaaaatacgtgagaggttttaaaatcagcaaaaagaagctgtaatttataaagggttttttaagcaacaagcataaaaacaatcttattaaaatgtactaatcatataaagattttagtacttgtaacaacaatataattttttgtatattatctgcaattatgaaatgtcatgtataaaaaaactctagggcaagtggctaatagtaagtatctttttactattatattattagagttttatcaaaaagccgctctctatgggcacataaattggttgaaagatttgaaagagaacgttattttaggaggaatgatacctgttggtgatataaaatatatatagattttgtgagtaaataatcttggtcaaaaaatttgattaatcttcttgagtaagatatttttctctaaccacaagactaataagtgtataatctaaatatgcacactctataactacaaacaacgctcattttaatagtttttaaattctatttatctccttatcctgttagatatacatttacttctttatcttttaagctgtcaaatatggacaattgttcaatctaacaaaagaagtcgaagactgggatagaaggaccatgcggaattggtggtctttatgggccgatggttagcacctcctgtcggtgcttttcatcccattttaaaaaatgtttgataaaaatccataatgctatcttacacttagatgcagagttgaaaaagaaaaaaaaagttataaatataatagaatttatgacatgatagaaaaaaatgaaaaatattggtgaaatatttaaaatggattatgtatgtgtatcattattctatctattgaaggatattcaaagctaatcttctatttttttatagttgaggtgaacaaatataaacatcttctaactctatcgaaattgatttttttttttaagtgggtattacctcttatatgcactcaaaacgatcattgacatgcgtaattaaggttaattacataaaccatattaaaaatgtatttaactttttaacaggagatgtcaacggttgattgagaaaaactacatatttctggatttaatagaatgaaatattttcactgaacatttatacttttctaaaataataaattaaattcttcagtgtacattataatcatgcatgcatggtttgcccatgaacataatgatcaagcaatcctttaatgggaagtcacaagtgtttattctttcggcaatcatgtggaaaaccatgagcaaaacgtatgaaatcgcggcaatagtcgtaaacaacccatcttgaatggatctctttgaggtgcttcctgatttgagcatcaagacctttgtttcttccaccattgaaacccatgcaagatggggtccctggtccagcaatgcacgcattcgcattgaaatttctgaaacctgctataaatggagctttagaccaatcaatcttaaccttcccccctcttgttgcccaaaagtctccattccataaagttgcataaatcttcattggttgacttgtggggaatggaacaccgatgctctccctgttgtgcatcactctgatgggtgtgttatccaccaagattctacaaacacacataaaagaaaaacacatttattctatattgtacccataagtagaattatacaaatttattttgttccttacattattgaatgagttgtaatttcacaagcaatctaaaaggtttttttaactgtcattcaagtataaacattatgataaatttcttaacttttataataattatcaagtaatattaacaatgatttcttattgattgatagaataattttttttgttttacatatacaacatgtatctccagaaaaattattaagtatgtggttctagatcattatgttttcaattaatttttacattatatgtatattaagtgttataaattaaataacttaaatacatgttacatataaagattggcaccataaacaggtctgctaataattttttgcatcttgaaatttaattagttctatgattaggccatattaatgaattggacgtctatgtataaaaaaaagctttataacgatgagtgcatataaattaaattcttaattttatacataaatatattttgtacttacattatgcgctgactgttccaatcaatggaataggtgtggaagtcctgtgtaggatcaaaccaaagatagaactgcatctcacgacccccagtaccgttggcataataattggttgagagaatgtatggatcaccagataagttgcccaagaactctaaatcaatctcatcatggtttggcccttgagagcttagctgcagaagtaatatgcatgaatattatgcaatatataatgtagtatatgtgtatgttgtaatatgtttacgtgtgtgtgcatgcatggatgggagagaataagcaagtgaatgatgggttaacttggaacaagttagtcatacataaaatgtagtgacagtgcctgcagaatttcctggtataagcttgatttgcatgtcaaatcgtccaaacaagtactccttcttggttgctatgcccgagccagaagatttgtccattgcaagggacatgcttgagcctccatcttgtatgttagctcgattatctccaaagagaatgttaaaatcagtgttgaaattcccacccaaagcaattgttgttgaggctaagaagctgagagaaagcatgaataaaacatatgaagaagccatgttaatttgattatctgaaaaaatatgaatccactaaggtatttaaagtgatgttgcattcacgaattgagatgataatcgtaaaatgcagcggattcatatcaatttagctgtcaaaggtggttgtggtaactgcctcaagcgcaatattgctgtcacaattacaggtcaaaatcttgaagaaccgaataaaatgttttttaatcacaaaattaaagttctgatgggaggagagttggttttgatgcatagatatgtgtggacacaattttaagttgaacacaagtcaaagcccaaaataagttaacactaaaatatgtagtctatatatgggctggaccatgaagaacaaaacaaaaataattttcaatggcaaaaagggggtttaacttcctacacccaacaaatttctaatacacccagcaatttttagaaaatggcaatactacccttgttgctttttaacatacacccagcaggttttttcttcattttcttcttccatgctccttctgcttcttcgcgtcttcactgttggttgttggctgcgtgttggtgcctcttgtgtggttggtttggttcgggaggtcgtggttagcattggtggagcttccattggccgctgccgtcgtcggaggtacgttctgcaactgatcactgtagcagaaaccatacggattgccaatccgtatgggttttttttctgtttgttttgattttgggtttttttttggttattttgagttgtttttgttaaaaggaattagtaattattgtatttttcctctttgaattaaaataaccattaacttttgaattatgaggaaaatttgttttgaattaatcacaaagttgtgaaatgaatataaccatattttttgttaatgattatttgttttgaatttgtttgtttattaagatggataacgatgattggatgcatgatgatattatggcggaagaaaataatatgggtgaagacaacagaggtgaaccgtttgcatttgagaatgagaactctatgattgattgttctgatgcatttaagacttcaaaggtatttatgtgataaagtagcatattgaatgtcagtaaataaataatttcatgagattgaacatgtattctgaaatgttgtaggtgtttaattctcgtgacgaggtattgcaatgggctcgtagtgttgcacatgagattggttttgtagctgtgataatgaggtctgacacagcaactggtaagaggggaaggaccacatttattttgataggttgtgaaaggagtggaaagtatagagcattcaacaaagatttagaacgcatgaccagtagcagtagaaaatgcgggtgtccttttaagttgcgagggaaacccgtcgtaggtggtgaagggtggatggtaaagttaatctgcgggttacacaaccattgtttggctaagtcattcactggacatccatatgctggtcgtttaactgaggaagagaaggtaattgttggtgatatgacaaagtcaagggttaaacacaaaaatattatgctcactttaaaagatcgcaatcctaaaagttatacaacaatgaaacaagtgtacaatgcaagatatgcataccgcacttgtataagaggcaacaatactgaaatgcaacatttaatgaagcttcttcatcgtgatatgtatgtccactggcatagactgaaggaagaaaatgttgtccgagacatgttttgggcacatccggatgcagtcaagttgataaattcatgtcatttggttttcctaattgatagtacatacaaaacaaataggtatagactccctttggttgacatagtcggagtgacacctaccgggatgactttttcagctgcctttgcatatttggagggcgaacgtacgaacaatcttgtatgggctcttgaacgatttagagggctttttttgaagactgaatttttgcctaatgtcattgtgacagacagagatacagccctcatgaatgcgatcaaagatgttttccctggcacaatgaacttgttgtgtcggttccacattgacaagaatgtcaaggcaaaatgtaaaacgctcgtgggacaaaacaattcatgggagtttgtcatggaagtatggggaagtctggtagattgtgcttttgaaaatgaatgggatgagtgtctgatgaggtttgaatgtgtttgtgtaccatggccaatatttgttcaatatgtgaaagacacgtggttgatccctcacaaagaacgatttgtcatagcctggactaataaagtgatgcatcttggccacaccactacgaacaggtaaatgctgcacaatagaaagtttacaattacattatactgcatggtcatcatttagttaaccggtgttattttaaccgtttagtacagggttgagtctgcccattggaccttaaagagactactgcaggacagtcttggagatttgtgtaacgtatgggatgcgatgaacaacatgatcacgttacaacacaatgagattaaggcttcttttgagacaagcacacatgttgttggacatatgtttaaaaccacgttatacaaaagactcgtaggcatggtttccaggtatgcgttaaatgaaattgccgcagagtttgaccgagttaagcatgtaggtgtagatagttctcgttgtggatatgtgttaagaagtacacatggtttgccttgtgcatgtgagttagcaaagtataatcttggcagcataccactgggcacggtacacatgttttggcggagattgcatatgtcggactcaggtgttgatgagatggaggtgaccatcacagaagagatggaagcgatatcgaagcgatttgaaagtcttgacttgtgtggcaaagttactcttaagactaaattgaaagaaattgcgtatcctgatcaaacatcaatgtgtcctcctcctgaaaaggtcaagacaaaaggggctcaaaagaaaaaccttaccaagcatcaaagatcaacaaagcgagatccatcgtactttgagtacgtcgacgcattacattctcaacatgatagttgctcctctgtaccacaacccgcttcaacatcttcaggtcctttaccgatgggtgatattccaatgctggatcagttccttccgtgcatgagaaattacattattggtgtatgtgatgttaaagccgatggtaattgtggatatcgggttattgcggctctactgggttatggtgaagatgggtggcctgtggttcgtaaccatttgcttaaggaacttaacgaacggtctgcagactatattctattgtttggtgggttacaaagatttgaggacttaaaaagatcactacttgtggacggattctcaatggtaaatgtgacttgtgtctgtgattgacaatattaccatattgttatggtgcataacacttatactttgttaaaatgcaggtaacacaggataaatggatggatgttacagacatgggttatgtaattgcttcacgttataaccgggttcttgtttgtctttctaagcaacaaagtatgacttttttcccgcttagaagccaactgcctagagatcctgcgatacatcgagtcatttgtatcggtcatgtatatggaaaccattttgttcaggtacaactaatgtcgttttatgtgtttctaatcatttgacttgtgtacattaacaataaaacggtttgtgttcaggttgcattgcgagatggctgtcctatgccaccaattgcattattatggtcaagacattgtcagcctcaagcaaatgagtggccatctagttacattagtcgactgaagaagtatacaagcttgacaacattgccaccagtttatgttgatctgggttctgacatgctttgactttacgtaatgttttcatgtgttgtgaactaaatggcagggggttatgtaattgtattaactgctgcattctgttatttcgcatgacaaaatactgtcgcagatggataatgttaaaaaacatttacatatatgaaatgaaatgtttgaacaatacaataatgttaatacatatgttgtcaacaatacaaaaaaagtaacaaatcaatctccacgcggtccagtcctacgacgtctcaagcgaacatacactctccgatcatcgcagacactgcgtgctaatgtaacacagtcggcaacagtctcgtacacatcggtgccagaggtcaccaaccgaagatctataagcctctgcaacctccctgcaatggttttgaatgcggcctgcaataaaaattagacaaactgtgtaagcggtcgttataatcataacacaggttaaacattttttaatacgagacatgttttacaaatttgtgttaccattgcatgccgaggcatgtcaggctgatcagctgcaatgtcacccgtggggtctgccgtagtagatggtggatcatctgtggtaactggcacatgaggaggcgctctgtcttccccaggcttaggcgggcacatgaaagggtgtgatatccggtagaaccagtccatgtatgcagcctcgcactggccggggtaaccggaagggggtcctgtgatagtaagatggtgggcgtaatgaagccagctgtcatccacctcttcatctgatggggtgggcaagctcaggagaatggggatggtctgaatgcagccaaactgtctgagtaccctctctggaaggtacctaaatataacctgagtagagacagatgacctcaaagggacggaccggacgatgatcgatgtatggagtccaacagacagcgtcggtcgtcaacctatctagtcgcctccgataggaactgacaggtaacgccttccccggcttccagcgacatgcccgtggctggctctctacatagtcctcatccgcaatcatgctgccaacacttggaaagtactcgtatacccaacacttaagtaacaaaaacaatcaaacacaaataagcagttgaaattcactttcacattaaacaaataacaaattttaacttatataaaaaaattttacctgaagcagactaatataaccagcaagatgtttaccatgatgctgacaggcgtagttcaagttatcgtacatgtgttggagtgcagtcgcccccaactgaacccgcctgactggtggagatcacgaaatggctccaagaataccacaccaatatgtgtggcactcttgttagcaaaaatcgtgcaaccaaccaagtggagcaaataagctctggctgccaccgtccactgcatctggtgacacctctcatcatataactcccgcaaccatgacagacgaacataaggtccatggcactgtttcgtctctgctgcagcctggtcatgggtaacctcaagcaaatctactagtaacgcaatcgcctcatccacgtccaacacatcgtacgtctgcagcgcacccatcactggtagatgaaatagacacgcgacgtcgtccagcgtgatcgtcatctctccgatcggcaaatgaaaactgctagtctccttatgccacctctccaccaatgccgagattaaaccccggtcacctgtatctaccgaacaggtgatcagtgggcttaatcctgtacctgccaccaacccttcaatctcaggcgcaggccggccaaatttatgcaccttcctcccatgagatgccaacttaagctccgaccgttcctgtattagttgttagttacatacacataccctaacgcgaaaataattatcaaattcaactatgtttaaatacaatcatacctcccccctccaaatcctaggtgcaatatgttcatcgtaatgactcaacactgaagtgtcctgcggcccaccggaaaatccgtcaacatcagaggcatcgatgcttccctcgacctcagcctcaacaggtgcaccatggtcaacatcgtcagcgtctacctcagcaggcacgtcctcaacaacaccagtcctttggcgttgtctccgtgctgatgctgtcggtcttcgtcgtacagcgggttcttcttcactagcatttcttgccaaagcccgccgtaatcctatcgtcttagccataatctgacattgaaaccaagtagttacattacaatcatacccatttggataaacataatcctttcagataacgaaacctaacaagtagattaaaaaccaactaccagctccatacgattagacaacatgcacttcacatgtggatcaaatcatagtaagcatgtcgaggatcaaaaccaatgtaacaagtccataccattacacaacatggttttcacataacaattcatttaaagagttcattttactcataatattacacattatctagccatcgatcaaaccatacacatgtcgaggatcaaaaccaatgtagcaagtccataccattacacaacatgattttcacagttcaatttattaaaacagttcaatttcctcatcacatttcaaataacctaataaatgtggatcaaaccatagtatgcatgtccaggatcaaaaccaatgtagcaagtccataccattacattattaaaacagtacaatttcctcatcacatttcaaataacctaataaatgtggatcaaaccatagtatgcatgtccaggatcaaaaccaatgtagcaagtccataccattacacaacatggttttcacagttcaatttattaaaacagtacaatttgctcatcacatttcaaataacctaacaaatgtggatcaaaccatagtatgcatgtcgagatcaaaaccaatgtagcatgtccataccattagacaacaagcttttcacataacaattcatttaaagagttcattttactcataatattacacattatctaatagtcgatcaaaccatcaaaccatacacatgtcgaggataaaaaataatctaacaagtccataccattacacaacatactttacgaatcattcaaccataccaattccataccaaacacattttaaagcagttaatttcattcatttttaaaaaaattttaagcaaatactcctacggattggcaatccgtgaggctcccacggattggtgatccgtaaagctcccatttttgcaatttcttaatacggatccttaatccttattaaatacaccttacggatttcaaatccgtacgcatgccaaacgaaatgcacttacctcatcgccggaaaactccaccaccttcgtcgcctaccaccacaagccgtcgtccagagcccgagacaggagaaccacctgaaccaaaatcgccacaagcacacacagagcacagacaaaaacgcggaaacgattcgaatgctgggtgtattagaatttcaaaaaaagcctttcttttattattttaagcaaggtatttggggtaattccaaaatagctgctgggtgtattagaaatttgttgggtgtaggaagttaaccctgcaaaaaggtctgattggaggaagttggttttgatggcaatttttatttttgggctttacatggctgcgtcttgacaaaattacataaatcaaaatcaaaagcccaaaagaagttaatactaaaaaatgtagtatggactggaccttcattacacccttcgaaacatgcaacggaatagattaaaattaaactattaagttgtaatattaaaagttgaaatcttaaaaaatatcattataaagagactttttattttattccccattaaatacatcttccacggaagacaattatgtttgaacaagtagaattattatgctcgagtcaaataatattattatagatataaaaattctactttcaattatttaacacaattatatatttaagatctgaacttgagatctataattaaactaaatttttttaggtaagttgatccacatgtttgatgatgaaaaaaattaattaattaaatattagaaaaatgatttaaaaaaatagtatttaatacaattacatattcaagatctaaacttaagatatatgattaaactgaattttcttaaatcagttaatccacatatttgatgatgaaaaaaattaattaattaaacactaggaaaatgatttaaagaaaaaaataatactagtcaactagtatgaaaattgcggaaaagtattgagtatggtacacgcaaacaaaactacgttagtacgtggtgctggcggctgagtgtgcgctaaatttagcgccccttggctcgatgacttgaaggtaggaaaatcaaatttgtacgctatttttttattttattttgtattttatctgtattactttttttttttttactttataaagaaaaaacctctgcttaagagtttctgcatgtgcagcaagatggtcacacacactcacaccaaaggctctctcttggtatagaagttgaacaaaattctagaaattggagtaatagaatgtaaataattgacggtgcaaatatatatcacgatcaagtagttattgtgcagtgctagctgtcaaatagtgatgatggtggtgagctaggtgcccccagtgggtggcaattcagacagaccatcttaacttcttcacgttcacaacagagcactctgccacatatcagtgccgtgcaatgcatatagtcaaaactgtatcagaaaactcgtgtagctaagtcttcctccccagacccacacaagtagtaatatcagttggtacatttccgatccatatatttacatctgtgtagtattacttgaccctggatctcctccagcaaacaaaaagtacgtttcttctaaaattgatgtttgaagggttatatatattccaaaatggtaagtcatgagattaattcttaagacataaagattattgaaataaattatgtttctcccataaaagtctttttcataagtaaggtagaataagaacaatataataattctttcaggcatattctataaaatagtcataattcctttggtcacgtgtagtatagtttatttggattttttgaagtgttaaccggattcaagacttcttaatagtgagtatatatgttttcaatctcgagcttgaccatgttgtggatcatcaaatgtatgtgtctttcaagcttaacttcaagggattgtgaagtgttcgatcgtgaatcatacagcttaataagcatatgtgcttttaagacgattgagtgattctcaattgtccaattgaagatggatggacatctaatccttggacccaatataatggcaagagtcaacacaaaatacaccctataaataggcatggctcgtatttgatcatatgagataacgcatagtagagctcatttgaatttcttgagttattaattggatttacgactggggcaaaaaaaattaatattttgttttttaaaaaaaaaaattacttcaaagttatttacgcatctataacaacgagttgcgccctcatcggatgcgacttccctagttgtgacacgtgtcattttgaaacatatggtattttgaggcgcaatgtatataaacttcaaatgattataatttttgatagaaatgtccgattgagacgtaatttgtgtcaaaatgctcaaaattgagataggaatggctcggaagatccatggtcaaccttttttttttcatcaaaaaatgtctttaagtgcctcaaatttaggatttaggattcaatcatccaaaaatttcctttttgtctacttttttaattatttaattagttaatttaatgctattttctattttttaattacttctcttatttcgagcgttttgacataaagtacatctccatcggacattcctataaaaaattatgaccgttcgaagtttgtatatacaaaaatagttagaccatttgaagtacgatattcaaaaatagcattagtacgatttttttccccaatagggacatatttttctttatttaccaaatgggggcagggtagtcaacaaaaaaattaccacgtggcacaagtccttttttttttggaaaaaatattggtcactaaaatttaatcgctaattttggtctctatttcagtcgctaaaagtgttagcgaccgaaataacgacggaatgagtcacacctggtggagggcacgacttgacccctgttgcacctggtggggcacgactcgttgctatagatgcgtaaataactttgaaattacagtaaatctgtaatttttttaaaaaaagcaatattttaattttcccccccaatgagtatgttatcataaagttgtgttaacaacatttatatcagaatctgaaacttttcaaagaaatgagtacaagcacattttattttttatctaaagataggaagctaaataaaaatagggtcaattctttaaatttttttttacataaattatttatacttttaatttatataaagtttctcccattataaaatatatttttttatatttttatttttattttttcattatttatgttattctaatataaaaaaaaatcaattaaaaatttaataatgtttacttttaatagtttcaaatagtgctaccttataaatagaagattttatgtaattagtcaaaatatgtaagaagggtgttcttgttatttaaaaataaaggttttaaatttatgtgtatcatattccttgggtcatgttattttctccttctctgctgatataggattttgttttgttgtcatggatgaattgtgggccaactaaattggtgtgcagattgtttggaggagaaggaaatcaagtggctgattgtttagctaagcttggtttgtccttagataaacagctatgaatttttgaaattattcctctatttttatcaactgtagttttgacagatgtatcctctaccacgttttcttgtgatttttaatggattgttcttaggggtctccccttccattcaccaaaaaaaaaaaatggagagaatttgtgtaggttttaattacatagaaaaaatgtctaaaaaatgtaaaatagaaaggaagttcgaacagtttacgtaaaaaataatataatatttttatatgtaaaataaaaatataaaagtattttcttaaaccaaacaattcgttaaaaaggtttaattttaagcttttttgctttggttctcagtgattaggtgatcacaaatgatatgcctgatatgtttgttctatcatactttgacctccagtgcatccgttttctcttctcagtggtgttttgatatttaatacttgatgatggtgacaggtgaggaagctagagacttcatttctaaatagtaaacgtgttatcttttgaaatacaccattatatatgttcatgtttggtatgcattcatactatatgtgaaagaccatgtgagtttgtctattataaataccgtcctagcttgtaacgtataacgtagtatatatcatatagtaatgattaatgaatgaacgtgcccacttcattaatttccatcttcatccttgtttaattaaacatcagacggttctaaaagattaagaatttgataaattaaaagaagcataacaaatcacgtctttcatcagttactacttttcgcaattatttcatgtcagccatttactttggaaatgctgaaatgtacgtaacaccaatatcttttctggagttgtgatcttcaatggatttgtttcccaaacattctttttaactagtatattccaaagatgctgttcatgtgcatcttttataatatgttctgaatttccttcgaaatctagtcgaaaactggatccatacccaagtaaataacatgtgcaaacgcctcaattcaaggacagcatacgataggaaacaaaataatattaattattgtcttattggtaatgtgtgttccaagagtacaatatttttatatgtaaaacaaattcattttgaggttgtatgatcatgtatacttgggagaaattctaatgggcattccaagggaagggaaaggcaaaggatccattgcgactggctcatctgggtggagtaagaaccactcatattgggtcacaacatagtgcacaaatatgaggatatttaacttagctagtaggtaccctgcacacactcttggccctcctccaaagggaacaaatgcatattggggtattccgatccctcctcaaacctacttgggttgaaactcataggatccttaaaatactcttcattgtaatgtgtcccgtatgttatccatagcacctgagaagagccacaagaaaccccatgttacatgatttaattcaaaattgacaaattatgagatatgcatgcatggatttaagaaggaaacaagaaagtagtattcaccttccatcctctaggtataatgaatccttcatattcaatatcagtaatagccttcctgaaagaaccaaagattggaggaaacaatctcatgctttctctagcaacttgccaggtatacttcatcttctttatgtcctccattgtgagattctcaacccatcttttgttgctcattatagcaacatgttctgcataaagtaagtacttcaaactatcaactatcaactctaaatacttttggataatttaaagaggaaatagtctatacacttacattatgaaaagttttagaatatcaattaattataatttgatatatatggtaagcttttttttagaatatcaatcggtgccctatctttcggcatgatagagtcccttcccatgagcttaactgaggaagaaggccaagagattttcaccaacttgaactcattagacaacaagaatttattggcctcagctccattcacaaccacagttggagaccccatgctccttgttctgaaaatcttctcatgcttcagaatgcgaggatgaacaaactcttcaaacaattggtttctcctttgagcattgaagaattccatggtctcccctatcaatggaaaccccatttcccctggggggagctttcttttgtctttgtagcattgcttatgtctcaagaaattgaaagagactagcaaaagtagtaggggaaacaaaccccacaaaataaaatagataatatccccaaatattggtgaacttgtaaggatcaaggacttggaaaaatttaagctcatatctataaattgttttaagattgaaatgttggttcagcacatttttataggaacctgtggtttgtggaagaagatgaatgaagtcaaacccaaatgaattttacgattattataatcttgatcatcctagaagtcaattccttcctaataaatttctaatttgtgacagaaacaaaaaaaagaagaaaaaataatactgtagcaccacagcttgtgaaaagaatactgaaggattcttttctgtaatagattcattgtccgaaaagaatgacacgtaatcatcattaatatacctgagaaattcatgatgcaaaataaaaataatttttctcttcatggtcaacgctagaagctttttagttacccaagaatccttaaaaatctggtgaagtctcgttgttttatcatgtgactttggatcatgtttcagtcatcatgattgctcattattgcagcaatgtaaatactgattggtgtctgatggcgcagaatcaccgtctctgaatctcaactttaaaatatcttcttaaagtaattacaaaggtaggctgataatgttggagataatgttgtttgtaaccgcctaagcacagtcgttgaacattctaaacaaagttttcggagcatggcgataaattaaatcagcatcgtttacatgcatgttagaaagcaggattttgtgaatttattgcttgttgggggatgtttagcatagaaggttcatcatttcatatgtcaaaggaactctataaacaagctgtgaatgaattgtatacagttgcttttttacaagaaatattatgattacaaaaataacaagatttgtatttgctcaatgtcaccaaattttgactcgttgttagattattaccatatcaatcatcgggccaagattaacaaattggttacaccttttgattaggtgtttaagaggtatggattgtctaactgagattaataaattgcctgtctttcatgtttagcatacgagggattgtaaattgtttaaccaaaattaacatttgtctatgccttttagatttagcgcttgagagattgtgtattcttcagccgagactcaggccacacatggccaattgactaagcattcaacatgcctttaaacagattaataagataaatcaggctttcaaagggcaaaaaaataaacctataataaataatatactaggcttaggctttggatcttttaaacagatcaaatctatccaccatcaataattgacacaagtggtggtaatagtttacgttaatcaaattatttagggatcaaattccaatattagatatgaaatacaccatgctggaaagagaatatctatgttacgtgtgcttagtccccaacaaaatttagtcactattttttatagtggatattttgtttcaataccatggtaaannnnnnnnnnnnnnnnnnnnnnnnnnnnnnnnnnnnnnnnnnnnnnnnnnnnnnnnnnnnnnnnnnnnnnnnnnnnnnnnnnnnnnnnnnnnnnnnnnnnnnnnnnnnnnnnnnnnnnnnnnnnnnnnnnnnnnnnnnnnnnnnnnnnnnnnnnnnnnnnnnnnnnnnnnnnnnnnnnnnnnnnnnnnnnnnnnnnnnnnnnnnnnnnnnnnnnnnnnnnnnnnnnnnnnnnnnnnnnnnnnnnnnnnnnnnnnnnnnnnnnnnnnnnnnnnnnnnnnnnnnnnnnnnnnnnnnnnnnnnnnnnnnnnnnnnnnnnnnnnnnnnnnnnnnnnnnnnnnnnnnnnnnnnnnnnnnnnnnnnnnnnnnnnnnnnnnnnnnnnnnnnnnnnnnnnnnnnnnnnnnnnnnnnnnnnnnnnnnnnnnnnnnnnnnnnnnnnnnnnnnnnnnnnnnnnnnnnnnnnnnnnnnnnnnnnnnnnnnnnnnnnnnnnnnnnnnnnnnnnnnnnnnnnnnnnnnnnnnnnnnnnnnnnnnnnnnnnnnnnnnnnnnnnnnnnnnnnnnnnnnnnnnnnnnnnnnnnnnnnnnnnnnnnnnnnnnnnnnnnnnnnnnnnnnnnnnnnnnnnnnnnnnnnnnnnnnnnnnnnnnnnnnnnnnnnnnnnnnnnnnnnnnnnnnnnnnnnnnnnnnnnnnnnnnnnnnnnnnnnnnnnnnnnnnnnnnnnnnnnnnnnnnnnnnnnnnnnnnnnnnnnnnnnnnnnnnnnnnnnnnnnnnnnnnnnnnnnnnnnnnnnnnnnnnnnnnnnnnnnnnnnnnnnnnnnnnnnnnnnnnnnnnnnnnnnnnnnnnnnnnnnnnnnnnnnnnnnnnnnnnnnnnnnnnnnnnnnnnnnnnnnnnnnnnnnnnnnnnnnnnnnnnnnnnnnnnnnnnnnnnnnnnnnnnnnnnnnnnnnnnnnnnnnnnnnnnnnnnnnnnnnnnnnnnnnnnnnnnnnnnnnnnnnnnnnnnnnnnnnnnnnnnnnnnnnnnnnnnnnnnnnnnnnnnnnnnnnnnnnnnnnnnnnnnnnnnnnnnnnnnnaaaaaaaaaaaaaaagccttgttcaccctaacctatttctactctaacaatgatcaaccacgacttttttgagagaattacctctattattattccatatgatttcactaaacattagtataattttgctgtagttaaaatagaagtaaacctggcttttgtcgtggaaccttgcctatgctggctccatagcaactacattcataaaccaaatttcactctttaacaactcgcctattttggtaagtaaataaaagaaacttattaacaacgctatggtccttccaatctggtataataagctcgtcgattctatcacagccatatggtaaccaccgaaacatattgccaactattgagactgaggacttcgaaggaagcaacaacttttatgtcaggagggaagcttcctatagacataattgttagcatgtgatagactcagagacgttagacggttgcattcaatacagccaagacttaattatcaaaacttatgcagattagacgatcgaaagcattatcttttgaacaataaaaaaaatacgaaaagaaaaaatgtgataaggtagttaatgtgaagaaaaaagatagagaaaatagtgtttacttccaatccttaggtgaaatattcaaggtataatttgaattcttcaatggtcttttacgaattaaactctagggtaattacttgtaagactctaccagagtactactactatccaagacaatgtatgtcgtagatggtgaagtaaattagaatttgagtgtgaatattttgggcttacacttatatggctctcttcaagctaggacgataattctcatgcaagataatgtgacgaacgcttcatcccacaattcgagggtgttcattgctaacagttttatgtcatatgtctcagcatttcacgttcgtatgagctcttgactcttgtgtagcattaggaagtggtgaggaacattaaacattgttgagtagtgatgaattgtacttctatagtttttgggtcaacatgtctacctaatcaaatagaccaagatgggtcgagaacagtccagatcaaataatattataacaaatattctaaatacaatgttacagtataaaataacattactttttttgtgcacatgtaaatttattattataaacataatttaataatgattattccgttaataattaacataatggatacctatggccttgttatttattagtcatcttccagcttcacttcaccccgagatttgcccaacacctgtaaccaatatttcaggaattattaattgtttagaagggtggtccttcaccaatgtaaaatgagttatttctgataaatttatgcaaaaaacagaaaacacctttcttctacatttttttggacttgaatccactagtatgttggatttaaatttagttaaatattttgcttgatatgtttcataattagcatataaaataatactattaattaattaaaatgtagataatgaatttgaaaacgagtgtctacctatacataaagtataagaataatgaatactagcattgctacctatataaaaatgaattggagatgaataattttctaaaatacagatatatgaacatattttatatataaccgtaatcaataattagatataagtgattaatatgctgaaattaaggttaattcatttgggtaatatccgaattggatcattcataaaaacaattattaatcaaattttgtttaccttccaattgaacttcaaattagtcaagattctttctttctccttggtaaatcaaagtgttaagaaaaaaaaatatcaccatacaaatgaaaagcattctctcctgaaattcatatagaaaggtttatgtgtcatgaatatttatttatttcaaacagagaaggtgctccttccaaagtccaaaatgtatgtttaccaaggcagtaggcacacaaaatctaaattgaaactccagcaaatgaaaaggtgttgaaacctatgaaacactaactcggacatggagatagatataacacggacacattaaaatctaaaacataggatatgggtacacaatattaagtgtctattgatttttaaatttttttgattaaaaataaaattagagaagtatatgtgatttgtccagattagtatttggtaagtggtaactaaattaacaaatctaacacgatataaaactatcaatattagatcccgagaaaacgttgtcctcaactggttcacccaatgcatagctcaagggccagttagtgtacgctcctctgtttatggccggaatttttttattatgtatttggcaattttttagttttttttaaactttacatataaaatcaattttaaatataaatgtcataaagttgtaggacaacgtgatactaaaccctaagaaacatgaaaagagaaaaatctaaatccttatttatgtcctattgatgaagaacaatatacaaatccaagctttaacgatgaactcagaaatgtccctcccgaagcacctgcccaaaacagtcacaatccatgaaaagttcacaactccattgatgagagactttccagttcctacttccaaaaccatgggtaacaatagcaattcacttccttacaaacaaatagacaacagctttgtcttttctatttagtccataggccacagctcacaggctcacagccaacttgtttttctccagtcctatacattacagtctgcacacacatttatgtatttatatcaacaaatatttaaggatatgtttggataaatttttctattaacatttatagtaaaaaaatgtaaaatgtattatttaaacttctctataaattaaaattaatttatacacctttattttttattttatttttctcttttgagggtgaaaaactagatgttattcggtagtagaaactgaatgatttgtgtatgtttagattaaaatttgaaaaattaagtttggattaaactttagtttacaaaagtatctcaaatattattttttttacaactgagtttcaagacaaaattttagtctcaaatatatttttggagattaactaaacataattttaaactcattttcctcttaaacatacttttaaccctcccaccggaaatccaaacacacccagccttagcctttgtagacacaaaatgttccacttggaagggaatttcatctatccagtatttctcatgcaaatcaaaagctaaagatgctaattcatggcaactctagctaaacaatctgttataattccatgaaaggagttgctataaatacttctaaaaaatttagtaaacagagtatacgtaaacaaatttgtaatatacaaattcaaaatcgatgctcgagtagtatcaaaatgtgaggacagcttgtaatcttaccggcaaaaaaaatggggggaaacaccactcgtatccactattctcccaacatttttttagtaaactcacctaccctctgccattgtcatttagttcggaatgactcacacttgtaatcttcgacattagggtcccttctctctctctctctctctctcttcaactgccttagttcaatatattttttcatgcaaaatgattattacataaatattgaaaaattattcctggggcacgtctccattagcccaataaatgaatcgggtgctggagatttctctgtcaagtagtatttgatttgatttattgaaggttaaataaatgtataactcactaagcttacagaatataaactggtttacgcctgtaattaataccataataagacaaatgcaacactcaaagctaatgagtaatttcagtacaatccagctcaagcttatgattaacaagaaacaaaggccagagttaggagagtgcgttctgtgttttaaagctattttagaaaactcaggcattattgcatgaagtagtagtaaatacggagtaaatgctcctgcaaaacatcaactaacccgcatactcctccacctgctaatatttactccactctgtgaatcattttatatattcttcccagtccactcccctctccaaactcaaacccccccttctcttctttctcatagtgttctaagcagtcagtgacaatggagaggaaaagacacagtcctatttctttcactatgttcacattgctacttggagtgctttctcagaaccttgtcatccctgtagtatctacccctgccatcattgtggaccagaagaactacaactctccagacccacatgcaggaacagatttatcaaattctctatgtaattctcttactcaactatacattttgcttcattatttatgcaaagtagaagatatcatttccttgctagctacagtaggccatttactttcaaatttgaagtacgaaggatcaatagctcttaaagaaactatcttgacatttaacttaaaatctaatagtatacgttgcttttacttcttgaaggttcatactgctctccagatcatggttctgggagtggtgggcacggaagctcaccacaccactctcatcatggaacaccctctcatcatggatctccatcacatggaggtggtggaagttacaatccaaccccatcaactcccccaggtggtggaagctatgatccaactccatcaccaccctcaagtggtggtggaagttacaatccaaccccatcaactcccccaggtggtggaagctatgatccaactccatcaccaccctcaagtggtggtggaagttacaatccaacnnnnnnnnnnaccactctcatcatggaacaccctctcatcatggatctccatcacatggaggtggtggaagttacaatccaaccccatcaactcccccaggtggtggaagctatgatccaactccatcaccaccctcaagtggtggtggaagttacaatccaaccccatcaactcccccaggtggtggaagctatgatccaactccatcaccaccctctagtggtggtggaagttacaatccaaccccatcaactcctccaggtggtggaagctatgatccaactccatcatcaccaccctcaggtggtggcggaagttacaatccaactccatcaactcctccaattggtggaggctatgatccaactccatcaccaccctcaggtggtggtggaagttacaatccaactccctcaactccccctggtggtggaagctataatccaaccccatcaccacccacagatggtggaagttacaacccaaccccatcaccaccctcaggcagcaactgtggcacaccaccacatgacccctctactccaacaccctcagtcccaacaacaccatcaaccccatcaacaccatcaaaccctccctcaggaggaggtggttactataactcaccaccaacttatggaggtagtagccccccaacaccaatcactgtgagcccaccttcaaccccaattgaccccggcaccccttctatcccctccacacccccttaccttccttccccaactcccttcactggtacatgcaagtaagttcctacttcttttcactacattgcactataaactatgatatgatattcagccacactgttaagtaacctatgggaccttgtcctctaaattgcagctactggaacactcacccaggaatcatttggggattgctaggctggtggggaaacttaggccatgcatttggtgtctctagtatgccaggatttggtgccagtctcagcttgccacaagcactttccaacactagaactgatgggctaggagcactctacagagaagggacagcttcctttcttaattccttggtgaacaacaggttcccttatacaacccagcaagtcagagacagatttatagcatctcttgcctcaaataaggtagcagcagcacaagccaacctcttcaagatggctaatgaggggcgaatgaagcctcgagcatgatatagttaatttggtttgtgtgtcagtttatttagttaagaatattatgtctaagacttcttctaagagtgtgttatttaggcttttatcttgtgtaatatggatatcgttttactttacaagttcatgttagcctttatggtttcttattctgtaataaagtttatatattgttacttcaatagttcaattatatctgcatccgaaagtacaaacttcttttcattatatatgaaaaaatgcaaaattcttattaagataaacttatttcattatataaaaaatcacttcaactcagctaaaatggaaggcaaaatcagaatctgtgatataattcatcaaataaaaactgagtattgttataagtacagcactaaaagggtgcatcatcttctcattaatgaaggtccacctataaggatgtacataatctgtcaaaagaaattgattacccataaagtgtaatttagaaatagccctagtctagagatgtcgattgttcatgcaacatgattgcattcaagagataagaatgatatggtgagtcttgaaaacgtgaacaaggtacaaactgtaaagaatgaagttgtctagaattgtttcctagtgaaaattcaagggaacggttttgttgccaatatatatgcaaacaaagacaatagatggaccaagatgctggcaatggtgcccctatgtgaattggaaatgatgggttacagtggcacaggaaggattaaagcgccatgtgagctccaattaatgtcttttaaagtgcctcaaggggaagtgtacaaggctgtggtatggtccagaacaattacaccggatggtaaagactataaaaggagggtagtcttcccagtgtaatgtaaaaagattcattatatctttaaaacacaaacacatataaaacccaaaacgcgtcttcaacttaccaaatacttttgagcaagataataactgagatattaaagacctctactagtttagtcttcccagtgtaatgtaaaaagattcattatatctttaaaacacaaacacaaataaaacccaaaacgcgtcttcaacttaccaaatacttttgagcaacataataactgagatattaaagacctctactactttagtgtacttcgtagctagaaagttatattgctttgctatatataatatatttacttgtgttaatggtaaggaataaaacgaagaacatggatcaaattctttgtgatttaaaaagaaagtatttttttaattcaaaatatgtttgaaaaaattatgttaattagataagttttttggaggaaaaaaaaaaaagtaaaagcctcaaagaaaaagttgggttgtgcttttatttttcacaagtaaaaattaataaattctagataaaaaactataagaaaattatatgtaaaagcatttattttagtttatccgaaagaacccaaaacttttaattttaagaatttcagtgtgtatataacttttaagctccaaaagcttttgaatgcttaagatgacaaacaagaggaatatgaagtcatccatatgtccaaggtagtcaaattgagatcccacctaggattggaaaggaggggaacatgtatattgtaagatcctaacaaggatagtaagatctcacataaaatacaatatacaatatacaatgtttccaccccacatcacttccattttcaggagcattcttgtgcttagaacctccacttgcagggacaaaaacagcaccatataattacaagaatttggatgtttattggtagaaaggaagaaagctctcaaaatactatagtttagatgcttactgatagaaaggaagaaagttcccacttcccattcataattacagtagaagtgagtggaattaaaagaattacaagttcattgttcccatggtgccctcatatcaaacacattaaatcttaggatgaatggcaaaaaagataatttcaaaagttattccatccactcccctgtcaatttgaagggaatagagaggtgtggagtggaaaggagtctccttgattccattccttttcctttctaaacatccaaagaatggcatcttttactatctcatataatttttctcctttccacctctcaccattaatacaagcaaagggtaaaaacccaaggaaaattgtatgcatttaattaaaatactgtcataattcttcaccttgaaaattagaagccctcatctaaaacttgcttcaattttattcatttcagttcttatttaaaaattatgtttgcatttcttattttaaattttattcaagtatagatgtcaaattgggtttagatcatagggcaaataagtctagtagtcaaacttgcaggatcaggctcataatttgatagccatattaaaaagtgtattttgaaactcaagtccaccagggtattcaaatttcaaagattaaacaatgatttgtgcttcaaatctaaagaaaatggtagaaagattacaattttaacaaaatttaggataacattcagcatactgcttgccaaagcacatatggtattggtacaaaggttcagaggcataccttttacatagataacttctgacagtaacacccaattaagaaattccagcccttgagactcaatctctgataaagaaaccactatagcagtttttacatgagtcaatggatttcaaattgaatttcaggaaaattgagtcgaaggttaggtccatcatatacaagtggtttcaatgcaggtaagttttgatgagctcatgtgagattcaaaccatttaaaaatttggtcagaatgcacactagtcatctcatggtaagcaaatgcaaggtttagctcctcttggatgtgagggaccagattcttatccagcagaagagctttcttctcctcaagagcctttttccatttgatttgacgcccatctttcctcatataaccatttttatcaataaagcccttttcctgaaagaactcaaataaatttctggaaagagcctgatcaagccctggaattctatcagctaaagtacttggtgacaatggaaactccatacattcaacaacaccaacatcaatccctttatcttttaaaacctccacatactcatctattttctgctgcctataaagatctttgggcatgtgaacaaaaagggtcggcgggtagtcccctttaacatcaatttgctcaaacatcccctcagcaatcatgagcacagtactactaaacttcatggcggtggcaagcacagacacgaaataccctccagaagaagcacccaaagccacaacaggaagcttctcaagcttccttctaccaatccaccactctataatgtccttaacaaccaacacttctttaccaaatgtccaacatctttgtgcacttgaaatagtaataacagcaaaaccatgggcaagaccatggagtacaagcaaccgttcctcaggcaaaccaatgcaatgagggcattcagcggacttgtcccagaagttgattgccctgccattgcatccatgagccagaaagagaacacctttaggtgattcaggcacttgccatatcaaatcagttccattccggaactcttttgttggatgcaaacgcaccaaagagtcaaagctattccatttttgtttaggaagttcataagctaaactgggattagcaccatcactgtcataacgaaatactaaaaggaaaaccactaacattagaatcaatgtaaaaaacaagaggaacacagaaacccggcaattctgagctccactccatggctttggtttgaatccacgcttcaacatgctgcaagaagggttgatagaaagggtagaaaagatcaaaattttaccaaaaactttcttgagagaagattggtaaaccatgaagggtcgatagcgttaaatcaaatgcatcattcaaatcagaaggagattacctacggtgttgaatctccaaaatcgacactacttctgaagtgttgagctgaatctctaggtgcaaggataatccattggatgaaatactgaaatgttctgtgcggtaaacgatttgcagttttgcactttagtcggttgctggattactgtcatttgggatctgttgttttcacctctttttttgctaagttcatcccttaccttcttcataatttttgaacattaacacctgatttttttccgaatgacacacaatatcccaccttaacgatttcaaatattattgggaatttgtgtaatacaataggcgtattagtataatgttttctaaggatattattgtaacaatagaaaaaagaattatgttatgtgtaattcgaaaaagaatatcacaagatactggtgcagtttgcttctttgtatatataaatacttttgacaaacttatttccatcttgcagacaaaaactattgcatataaattaacatgtgttaaatttatattaaaaagtcaaataaatatgtatatttagtttaatttcctggtctattagaagcagaaatccctgaatttatagaatttctgcctaagatcatggctgtaaattaagctatattcaatttaaatgtgactttaattcatcttttattttgaaataagagtgaatactattattctaccaatataaattaattatattttggtttcatgaatgtatgtccacagtgagtttgacctttccacagtagcattttgtgatttaatgtgtacgtcaactcctactcaccaatctcatcttcttgagcaaggtatgcacaaggaacatcaagtaacttgaatgtatgtccatagtgagtttgacctgtccacagtagcatggaattttttttattaatttaattaataaaaatacatataatttttttttaataaaaacatatcatatacacatcacttttaaagattctcaagtcataaaacattaaagtatctgtgctgcaagttaactttcggcagcaatcatttgttttttaccctatatttgctaattctatgacattcaacaagccagacctttggatttaattctaatatgcaatgacattattttttttttttggtaaattaagaaaaaaaattagaaaaatnnnnnnnnnnnnnnnnnnnnnnnnnnnnnnnnnnnnnnnnnnnnnnnnnnnnnnnnnnnnnnnnnnnnnnnnnnnnnnnnnnnnnnnnnnnnnnnnnnnnnnnnnnnnnnnnnnnnnnnnnnnnnnnnnnnnnnnnnnnnnnnnnnnnnnnnnnnnnnnnnnnnnnnnnnnnnnnnnnnnnnnnnnnnnnnnnnnnnnnnnnnnnnnnnnnnnnnnnnnnnnnnnnnnnnnnnnnnnnnnnnnnnnnnnnnnnnnnnnnnnnnnnnnnnnnnnnnnnnnnnnnnnnnnnnnnnnnnnnnnnnnnnnnnnnnnnnnnnnnnnnnnnnnnnnnnnnnnnnnnnnnnnnnnnnnnnnnnnnnnnnnnnnnnnnnnnnnnnnnnnnnnnnnnnnnnnnnnnnnnnnnnnnnnnnnnnnnnnnnnnnnnnnnnnnnnnnnnnnnnnnnnnnnnnnnnnnnnnnnnnnnnnnnnnnnnnnnnnnnnnnnnnnnnnnnnnnnnnnnnnnnnnnnnnnnnnnnnnnnnnnnnnnnnaaaaatatataaaaacaaaacaattgtttatttcattaaaaacattctttttacaaaataaatttaaataaacgagctcacaatatatattcccaccgatattcttattacaagcttgatcctgctgttttcagtattttgttaggagacaagcaaattatattgtacatcttctaggaaagacatcgcaatttcatgttagtcactagttttttttttttattacatatcatcttgtattaagactattcttaccaatgaaatgctttcagttgttttacttaaaaaaaaaaaaaaaaaaaaacttgatcctaatgaagaagcattcttattctagttgatacgatttgtgacgcaccttccatcttgggtcccagcccgcacctttcagactcatattgggctaacaacagaacagggagcacttaactatttactgggccaattgtgggcccattcagaagcaccaaagacaacaaacatcaaccatgtgcatgtgcatgcttggttccttcagccaccttcacctttgctccataaatttagcttttgactttgggcattccatcacgttcctccttttcacatttctcctttgtaaagcagattccatattggtttcaatatgcttaatcatgttatatttttttttttttcttcctttcaattatattctacttttttgtttaactcgttacccattttaaaattttaggatttcatggcgcttatgcgtctttactctttagtaatttctttaataatttgttgttagatgtattttgtgacatataaatacgttgattttggaaacatgcaagtttttaagctcactcttgtattaaaattcaatagactctttcacacaaaataattctttcaaattaaagcttaaacagaataaggtaaaaacatatttattgtcttattaattattaaacttgagcaaattcattttcaagattcacatgttagagttacaattagcttttgaaagaaacaaaacgatggcaataaaactctttcttgagtataactaacacatacacacatatatatatatatatataaaagattgttaagatagtaccaaatctttagtatgaattttgagttcaagatttggtttttattaaattttctaataaaaaatataaataaatttctaatatgaaaaatgaattattgaagaattctgaagatctgtataatattaaaaaataataatttatttttcctctcttttcttaagatctcaaaatgagatttatcacaaaaaaaataaatgaaagagattttggtagatcttcaattctatgtaatattatgggatcaatcaaaaagtggtctaagatcctaatttagaatttaccattaaagatatttttatatcttctcttagtgtatgtattagcaatttataaaaaatgtgaaggaccaaaaaatcactaatttaatattttaatttatttattttaaggatgttaccgtaatctgattttaaaaaaattaaaataaaaaagagtatgatttctctctcgcctttaatgtctttcgttccaatgcattttgtctttgcatcttctctcagaagtacatccgacaactcagaattacaacagcaggccaacaactattgcaacagcaggccaacaactatacctagattattggcctacgacaaacaactatacctagatgatcaatataataagttcgttagtcatcatatatattgttacggaaatgtattatcttgtttgaaatagtcaaacaacctctgttagcccacgataaccacccagaaatatggggcgtggccgttatcccccactagccgatatctccgcatatataggaactgcgcgttagctgcaaccgcctgagcaacaacatccaggtatcctataaatacacagtcattcatggtgaaaggtacacacaattcaagctctctcttttccttcacacctgcacacaccgcacccccaaagtgtcgtgtataccgtgcggtgatcttcttcctcaagtggcttcatttccataggcttcttgagagagagagagttcgatcctacagtaaatcatccaactccattgttggacatttctgttctctccgagcagaacagtggcgccgtctgtgggaacgataaaattcgattcccatcatctatcaatggctaacggtagaagaaatccaagttccagacgagaagacccacccaggaatccgactccggaggaggtggtggcagaagacgcgtcatcccacacggcatcatcccgtgcggaacctacgacgcaggagccggccaacataccaccggccgaccaagagaattctcaacgcttcatccagagcgctctccaatccctgttggcccgaatggagaacttggagaagcgttacgagttacaacgccaggaagacatccagcagctgatcgctcagctggaggatcgcgacgacagaagacgtgaggcagagcgtcggcaacatgccgacgataggcgcgaagaagttcatacagaagccgaccatgcggctgcaagaaggtcggtaccatcgacatcgatccgagctgccgaaaccaatcaacgagaccccacccaccaatctgaccaaggaaaatcattggccatttcacatacagcggaggaacgaccgacgggggcagtcgcccgtcatctcggtcaaggcagtggcacatataggaggaagtatagccggggccaccagaataatagcccgttcgttgaccacatagtcaacgccccgttcttggaagactttgatgggtctttcttgaacaagtacaatggaactcaagacccacaggtacatatcgatgagttcgatatgcagatgtgcgtacgaggaatcgacgagccgatcatatctcgaatcttcgcgacaaccttgacgggagccgcccagacttggttccactcactgccaccaaggaccatccgcaatttcgaagacttcggtcagaaattcttgctaaatttcgcaacaagcaagaagcagcccaaatctgagttcgcgttgggaaagatacgtcaacagaacggggaaacactacaaagctatttggatcgatttagagaagcagcactgcaggtccacgggttggaagagaacgtccatgtctatctcttatcggctgggctcaacggatcctcccgacttgccaagtcaatatacaaggatcctgttaaatccttgaatgagttcggcatccgatcccagaaatatcttgaactggagcagatggagatcgccaactcggctccgaaagataataaaaaaccgacatcaccgaaaaaccgacgaccagaaaacttccaaagtggacaaagtagccgacatccggccattctcccaacaggccgacctccgcgagggttcctcgacaaccgtcctagatcggggaaatatgaatcgaagtttgaaagatacactccgttgagcactagccggggacagatttggaaggaggtggccttcacggagatgagaaaagtaacccgacctcctccagtgatacggaaagaagggatggattatacccgatattgtgattttcacaatggaccgggacatacgaccgaccagtgctgggaacttcgagacgctatagagaggttcgtacgtgaaggcaagctgcgtcaatacgtgatccgaacccaggggcaccaagccaagaggaaagcccagcaggaaaataaaccacgggaggacaaaaaaagtaagaaggacgacgagttcccagaacccgagttcgaatgcaatgtcattgcaggaggaccaggaggaggaggcgatacggcaaatcagcggaagaagtacctcaaggaagttatgtcggtaagagaccggccaaagttcaaacaaaccgatagcggggacatcaagagagacacacctccactgatttacttcactgacgaagatttgaagggagttgtgcccggacatgaagacggtctcgtcataaccgggacagtcgctaacttctgagttaagcggatattcgttgacaacggcagttcagccgacattatcaactggagcgctttcaagaagctaaacttgaaagaggaagacctgaaaccgtgccaaacaatgctgtatggtttcaacggtgaaggtaccggcctaaagggggtgatcgacctccagctaacattgggaacaagggaaggcttcaggtcggagaaggtgacgtttaccgtcggagaattcccgtcgccgtacaacattatcctgggaaggcccacgcttcataagtgggatatcctgatgtccacaaagcatcagaaaatgaagatggtgggacacctcggtagagtcatcacgatctgcggagaccagaaagagtcccggcagtgttattacaacgcgatcagagaaacggagggcggtccgtcgtcaccacctcgacttcgccaaggggagcaaagaggatccaagaccggggaacaaccacctcggaaaccaatcaatttagtggagcttgatatgcgagatatagaggaatggagacccgagccggcagacgaactcgaagatatccagatcggcgactcttcgtcccaaaccaccaaggtaggcaagcaggccgacccagaaaataaaggcaggctcatccaatgtttgaagaaaaatcaggacgtctttgcttggaaggcgtccgagataccgggaatcaagcccaccttttgttgccacaagctggcaatgtatcccggctctaagccgatagaacagaaaaatagaaagctcggtccagacagaaagcaggcgttgaccaagcacatcgaagaattgcttgaggcgggattcatcaaagaaatccagtataccacctggctctccaatgtagtgatggtgaagaagcccaacggaaaatggcgggtatgcgtcgactacaccgacttgaataaagtctgtcccaaagactcgtaccccatgccaaacattgatcaactcgtagacgactccgccgggtaccgactgttatcattcatggacgcctactcagggtataatcaaatacccatgcatcccgacgacaaagaaaaaacggcatttcgaggtattagtgctaactactgctataaagttatgccttttggtctaaaaaatgcaggggcgacctatcaaagaatgatgaataaagtcttctcggatcaaatcgggcgcaacattgaggtatacatcgacgacatgatcacaaagacttccgcaaccggggaccacatccaggacctagaggaaactttccaaaagctgcggcagcataatatacggctgaacccgctgaaatgtgcgtttggagtaaaagccgggaaattcctagggtttatgttgacccaccggggaattgaagcgaacccggacaagtgcaaggccgtcctggatatgcaaattccgaccagcaagaaagaagtccagcagttgacgggaaggatggcagccctgacccgattcctaccacgatctgcggagaaggcccttccattcttcaagcttctaaagaaagaagctaagatcggatggaacccgacgtgcgaagaggcatttcaacagataaaggcctgcttggcctcaccccccgtgttgtccaaaccagaaccgggggaaacgctcatcttgtatctctcggtcggcgaagaagctatcagtgccgccttgatcagggaggtggataaaactcagcacccagtttattttataagtcgagccctcaagaactcagagttacgatatcagaaactcgagaaagtggccttcgccttagttaccacggcaaagaggcttcgcccatacttccagggccataccgtcatcgtccgaacaaatcaacccatccgacaagtgttgcacaagccggatctggctggacggatgatgaactgggccatccagttatccgaattcgacatccaatacgaagcccgccaggccatcaagtcacaagctttggccgacttcattacggaactgacaccaacgtcgaccactcagcagaaaaacaaactctggaaagtatacgtcgacggctcatccaacgcaaaaggaagtggcgccggggtcattgtcgaaaaccccgatggagtatcccttgaacagtctcttcagctcaaatttccaacttctaacaaccaagcggaatacgaagccttgattgcaggtttgaagcaggctaaggagcaaggagcaacaagggttaatgttttcaccgactcgcagctggtttccgcacaaatcgaaggcagatatcagactaaaggtcctctactagccaaatacctggcgacagtaaaggaaatcatggctgaattcgatgaagtaataatcgcccatatcccaagagaggaaaacgccagagccgacatcctatcaaagttggccagtactaaaggagcagggatccataggtcggtcatccagcaagaactcgcccaaccggcatgcgtcatgatcatactcgttgctgacgactggagaagacccattgtcaattatctagagcaaggaatcatcccggacgacgagaaagaagcaaagaagttaattcgagaggcggcggtgtatgtaatcctcaacaatgaactgtatcgccgaggtctacatagcccactattgctatgtttaaactcggatcaagccgagtacgtgctctcggaaatacacgaggggatcaacggacaacacatgggcgctagggctttagcactcaaagctctccgcgcaggctatttctggccgacgatgaaagccgacgcaacagaacatgttaaaagatgcgatgcctgccaaaaacacgcaaagatagtgtggattcccccgtccgagctcggattgatcactgcaccgtggccattctacaagtggggtatggatttactggggccgttcaaagctaccgagggtcaaatgcgatggctaatagtggccgttgactacttcacgaagtggatcgaagccgaaccattatcagccatcacctcagctcgggttcaaaaattcatggagcggaccataatagcaaggttcgggattccggccgaaatcgttaccgacaatggaacgcaatttaccgacagaacgttccaagcaatgatggccggcctccatatcaaacatcactttgcttcagtcgaacatccccagtccaacggccaagcagaagcggccaataaagtcatcctcgacggattgaagaaaagaatgcaagacgccggcccgaattgggtcgagcacctatactacgtactttgggcctacagaacgacgacccaaactgctactggcgaaaccccgttcagaatgacttatggttgtgaagccatgatcccggtagaaatcggacaatcgtcatggagaagacagcacacagcacaagaggaggacaacaatgccgccttaactgccgagctggatttgatagaagaagtccgcaccaccgcccaccgtcgggatctccatcaaaaaaataagctggccgaaaggtttaacaggaaggtaaagccgaggtcctttgaaaaggacgacctcgtgttacgccgagcagatatcggaaacaaaaacacccgagatgggaagctagcggcaaattgggaaggaccatatcgcgttatccaaaatcttggacaaggagcccacctattggagacattgaacggcaaacgagtccagcgaacgtggaacgcggacaaattgaagaaatattacagctgacaatgtacagccgaggtccatgtgttttcctttagttggcttctagtcggtcatagggatcatggaaccccatcatgtgtttccctttagccggctctaagtccgtcatcggaatcatggacaccatgtgtttccctttagttggccttagggcccgtcattgggatcatgggattagtgattttcattagattttgtgaaccgggaacatacacccgcgcaattctattttgaggtcacaataattctcagtaaattgttaaccgggaactatcacccacacaattttacttggaggacaaaaactgtaatttttcatgtctttatcattagattttgtgaaccgggaacatacacccgcgcaaatctgtaattgataccatgaattaataaaatccttgatgcaaggcatatcttcgtgcacgaattctaattgcttagtcgttgttttatattaacccggtcctgatcaggccggcgtaattgttcgatcactgatgaatcatcagaaactgaaagaattacatctaccgattgataattacgaatatattaacagttgctaaggccgggaactagacccgtacacctttatttaatatcggccaattgattcgggttaaatattcggctatgtacattgacgaaaaatcgaccaacgagtcaaacatacttggccgttggaaccaaatcacgagaaatgtgaaggtgtaaaccggcagatatcattacaaaataaagaaattgtttggtaaacagcaacaaaagaaaatacaaaagaggcgaccggcattccggcccttcaagcctctccgccatcttgaccgggcaccacttcaggcggatccgccgcgcttgcttcctcctcttcactatcggacatggccaaaagttggccatcaccaatataagatttgaaatgcattccctcggtgttcagctgcacaccggggttgaggaagcggatctggaccagagcattgttgaaggatgcctcggaagacttagcaagctgagattgaacaaagttcaactccttataagcctcctccgcatccttgaccttcttctcattgaagtccagcagttccttctggcgcgcgacggcgtcagcagcccggcgtttgtaggaagcagccgactccttgtacttggccacctcagcacgagcggcttcagtctccgcccgagaagcaccgagctcggcttgaagagagtccaattgtacccgagcggcctcaagatcggcagtcagcttagttgccaactcccgagcctccctagcctctgcttggcacgcctccacttctttgtcggcggcagcgacccgttccaaagaggaccctagctcctgctgaagccggcgcacttcaccctcggaggcctcgaggtcggcagccgctgtgcaggccctcttgtttaaggccaccaagttcccaagcaaggaagcggtcttgtgacaggccagctccaaggaacccagctcctccttgtcagaatcgctgaacgggagcagctcggaatatctttttggcgcccggagagcctggaaaagttcccgtgttaccccttgatcccaaagagttcgaggggatacacggaggtgctcgtcagaagggccgggcactacggcagcatcggcggggactggggcatccgtcgttggctcatcatgaacctcaacggagatctcggccaccggggacggcggaaggtcggatgaaggagcctcggtggtttggtcggccaggtcgagagattcgaccgatacggactcaaccacaataggtgccgaccgagtttcgccggctgcctgctggtcgtccgccggtcgcttcctcttcctcctacgcttaagagcctcaagatgcgccggcagaggggcacgacttgtgttcatctcggtagctgcgcaaaacaagcgttagcgaaagtatattacaaatattcagacttattctcgaaaagaattcaattcaaactgaccacactgaatataataagatatgggggccattgttcccgactctttgtatgaaattattcgggcagcagaagtggcgtcagaatccgacaacagggtctcgtcggttcggtaggaagcggagggaaggtcgtgatgggccgaggaccaatacaaaggaaatttccaaggtcccgaagaagaatcagcagagttgagaaaaaatggacgttggccgggttccgccacaactttgaaaaatttgtccttaaaacccttaaaggactcagcatacaaagagaagagccgacgatcaaagtggcgatcgacccgacctcggaaggaaatccatcccttccggtcggcaggctccttacccgaccgactagtttgaaccgcgaaaaaataaaagaataaaggacaagtacaaaggagctgtagcttctggcaaaggacctcgaaggcttgcatgaaagcccagctgttgggatgaagttgggagggggctgcgtgcaggtggtgtaacacttgcatctggaagtcggtgaagggaaaacagactcccaaccgagtgatgacatctctataaaacaaaaagtagtcagggccattcccctctcgagaagaacagatcggttcgcccggaaggggaaggcagacatggaaaccctcctgagccccgaaaggaatcagagcgaggtccccggaattcattgttgaggtatgctgcaacacctcgtgggttacccaaggaaacctacctattagagcaggaggagtttcagaccgagacccggttgcagacccccgaactgttctggcccgagatgagtccattgttacctattaacaataaaaacaaatatcagttcaagtacctggaaggaccgtcgcgatgcgggaaggaaaggtcgaagacggcaagatagatccttcaattgaagtcggcctttcaacagaggtcggcccggtgggattatgactcggtcgggccggaaaggtattggtttctttaggaacaggtttacgaacccagacgggtttatggcggcatcgatctaacactccctcggctcgtctatcatggtctatactagctagatatatgaattcctctatgcaatttgggcagggttcataccgaatctctgaatccggctcgggtatcgggtaggtttcagattcattcggagaggcaatatctgaagggggggaaaccctagcagacgccgctgcttgcaaggccagaagcgctggtctttggcgagacgaggaccctaaactagaagaccctaacctggaaggccctaatctggaaggattggggggtttggagatggaagccttggaacttcctggggcagaaggagttctgagtaaggattttttcttttcctcttcaggaaggggcaagccataaagccaaaaggcagcgcgaggagaacaggatttgcgaatctccgcctcttgctcaggggtatatttcatgattgagggtagcaatgcaggacaagatgaaggagtgggaagtgtgagaaggaaatcgatattcaatctctgtgcagaatcagataaaatgaacaaaacccaggaaacaacaaaagactgaagcgataaagagaaagggaaagcagaagaatacctgaaataagcgaaggaaatgaaaggaatgaagaagaaaacacagggaacgcgaatgcagcaatgaaagttgaaaggagagatatgaggaatctgcagtagaagagcgcgaacaagaaggatagggagaataccaagggtatggatgaaagaacgaagtaatgatctcaataaaggggataaaactgaaagggcgcattaaaacacgaagcgtaaccgccagaattcaaaaatgctggagtaactgttgagtataggggcatgattgtctttttagccccaaaagtcatgattgaaaaatacagaggggcagcagtttataagacacgtggcgataggggaataagagacgtttcattcccctatgcccctagtaacaaaggctgcgttgaaaagacaagttatagctcggcgagcatactgaaatgactgatggaattgataggagacttgatatcccgacaaggggcagaagtcgaggggcagaaatcgagcatgcgataatattgatcatggtcacatcggctcgaccttggtaatgtcggctcggatagtaaatacttcagttaatagcaaagaacagtcgggtcggacggggtcgccccggaacagcttccatcgcctcgatacaagtagagatgacatcggctcgaatattaaaattcctcggctcggataaaaaagcacaccggctcgaatgataatcatgtcagctcggacgtcggaaaacaaccgactttcttatttatacatcccggccatccagaatgctagatgaccgagctgaggggcatctgttacggaaatgtattatcttgtttgaaatagtcaaacaacctctgttagcccacgataaccacccagaaatatggggcgtggccgttatcccccactagccgatatctccgcatatataggaactgcgcgttagctgcaaccgcctgagcaacaacatccaggtatcctataaatacacagtcattcatggtgaaaggtacacacaattcaagctctctcttttccttcacacctgcacacaccgcacccccaaagtgtcgtgtataccgtgcggtgatcttcttcctcaagtggcttcatttccataggcttcttgagagagagagagttcgatcctacagtaaatcatccaactccattgttggacatttctgttctctccgagcagaacatatataaaagtcacgcacaattaatttttaatttttaatatccgtgtatgattatacaatttggatttagagtttttatttcttataataataaaagttcttatttgatatatatatatatatatatatatatatatatataaaagattgttgcaatgcattttctctttcttgttatgttttgcacatatcttctctcagcagtacatgccacaacccagaatcgcaacagcaggccaacaacaacggctctaacccagtgatttccccgcggatcatgatgatccttctctactgtgtttctgcggacgcgctagtgcaatgacccgaacaccaatgttgtttatccctcatcacccaatacctcctgaatacttctgaacctcaaaacataagcaacctgaaaatttacaagaatagctagaattgcacccacctagcttgatcacaagggaattataacttttctttgcctattcatttttagtaactaaagtgaaatgtcgaccaaacttgtaaggatggaaataaattttttgttgtaaattcaatataaataatgtgtgattcacatgcgatcaaaatagacacatatatgcatgtgagattcaagtattattattactttctccttaacaattatatttagaagccaatatagacgaaattgacaaaaacacaccctcacagaatgtaaaaatgttgtctaaagttaatttagagataaaaacagagcttatatcgaatcctattaaatatgcatatcataaaatagaatttaattaggcgaagagtccaaaggctcacactatcactgcaagctaaaaaaaatgtctaatgagtcattaaaatggtgacataacatatataacatgaagtgatagctcaacagtcaagaagtgtacgtagatatatataggtgaaaaaagacagcatatgtttcatatggactggagattaaagtggtaaggactgaatttaatgttaatagtgaatatgacataaagatataatactacattgaatgaaaataatatctctctctcacaaacggaaaaggacggacttaaaagtttaaattaattttaatttattgattatttattgtccaaatccataattctatccacttatcatcctaatgatgtgaggaatgtgaggcaatttttttttttttttgccacaagaacatttttcattattgaaaaaaaaaaaaactgaatatatgtacagccacaacatccttatccatttcattgtataatgactcaaggtagctagcgtgagtgccatatttcacgtccacattatcctgaatcaacgtgcccatagtgggcttggtgtgatataattcaagaatgattaatgaggtgctgattttccatattcataagaaaattgtctatacattattatttaattactgatgaccaaagataatagatagcatatttttttcaaaaaatattaattgctaatttattgattttttttttttacaggaaaaattaaacttaagacatatttattttttattttttcttaaccactcaactcatctatgtgcttgctccaattctgcatcaagaatcaaccgtttgaatatataggagaaattaaggtcagacaatcatgtcgtagtcctttgtgcatatactgttcctgcctgtaggaggtgtttaattttggtagtcttatcacgttgagctttataacaaattttaagggcggtacacgagtaagaaataaagggagaattgaatatttttgaaggcattcaattatatgtttaagttaaataattaattaataagactctagaaaaaggaataaaaaaaagaaaccaaactaatagatacttaaaatgcatgtgtttgatttttaattatcctaccaattgtaaaactcatttgcatgatatattgatataagcaacttgacaaagatattgcatcaacatgcatcaatgcatgctatagattgctagagctgttagttccacttaacatatgagtgctctctctctctcnnnnnnnnnnnnnnnnnnnnnnnnnnnnnnnnnnnnnnnnnnnnnnnnnnnnnnnnnnnnnnnnnnnnnnnnnnnnnnnnnnnnnnnnnnnnnnnnnnnnnnnnnnnnnnnnnnnnnnnnnnnnnnnnnnnnnnnnnnnnnnnnnnnnnnnnnnnnnnnnnnnnnnnnnnnnnnnnnnnnnnnnnnnnnnnnnnnnnnnnnnnnnnnnnnnnnnnnnnnnnnnnnnnnnnnnnnnnnnnnnnnnnnnnnnnnnnnnnnnnnnnnnnnnnnnnnnnnnnnnnnnnnnnnnnnnnnnnnnnnnnnnnnnnnnnnnnnnnnnnnnnnnnnnnnnnnnnnnnnnnnnnnnnnnnnnnnnnnnnnnnnnnnnnnnnnnnnnnnnnnnnnnnnnnnnnnnnnnnttactacttttcttttctttttattaaaaaggagaatgacaaaagagacagataaattattaaacctactagttatagtattattttctttctattatgtcttttactttccaacgtaatcatatagttttacgagaggatctaaatcccggggtaaattggtagaaagagaggatttaaatgatatatagtagtatttattaaaaaaaatcatctacaagttttttttcccattatatactttttctttacgtgtcatcctcatctaattctttaggtatacaatcactaccacttgccatatatttttagaactctacatttttcaaaatttaggtaaacacttactaataataaccatttttttaatctgaattataatcataagattaatattagtattagaattgaaccaaaccaaccaattggcatgcactggttgaaccagaaattaataatcaaaccagttcatttaaatctagaaatcagtcttacaaaaaactggtataaaactaattgaactaatccaaaactggacgaatcatccaagtttgaatcagtttgcccaaaaaaactatttctattttatattttaaattaaaacttgatattataattgttgatataattctaaaacaataatatgatgatagataattatgtttattatctttattttttaagcgtagttactaataataaatattattatgtgttattaaatttaaatattatgatatatttgatttagtttcatatttaatttttaatattatatattatgagtcatgaattttataaatttaatttattttttttaatattatgaagttataaatattatgtgattttttgtttaattttatttaatatattatattaaaataaaaataataatattaattataattaattaaaccatttcacctcccactctgatttttaaaaccttgattcagatgtgtggctgtacacaacgttttaaaaactggggccgtatgccgtaccaaatactactactacttaacatcaattaaatctaagtggtagattccttttcatatgtccatccaaatctaatttattaattaggatagcattgataaaacccatgcacacatcattccataatatatagttttataaacccaaatatatacctagaggctagctagatattttacttctgattgctttctgagtacatctagcgttgggttgcacacatcattccataatatatagttttataatatgatcaataagtatagattaatattttaaaaatggatacacagttataagagcccaaatccgcattggaaaaaattgaacaacacgtggaggttggagacagaatcgccgacttcaacattaatttctttaaaaaaaaaaaaacgagtgaaagtggtacagtggtagtatttctttgttaatagtcattaaaaacgttagatttccaaaagatagtacattattaaaagtttttaaataattttttttagaacatcaataaaaaattaaaagtataagtttttactaaaaatgatatttttttactgctatcaaaaatgctgttaattaatataggagtatatccgagttatttttagcatgatatgctattattattattattatttttattattatttatttaacaaatattttaagatattagtttataagattcaaattttaaattattaaagtaaatttaagtaaatacaaatattttttaatcattagcactattattttttaaaaaaaacttttctttgcaaaatttaaaatatactccatttgtctttaaatataagataattttaattaatttatacatattaagaatttaaatttaattaatttaattagtaatattaaatttattaaaatttataatgttttttaaaaaattatcaagatatgcctcacttttttatttttaattatttttcatctaattaatttatatgtgctaatcattttcttcaatttttataagataatagatgaatttatcttattaatttataatatttattattaattgagaacattttaattaaaaaatattaatacaaaagaaaacttaaaaaaatataataaaaagaaacaaataaatttaaaaaaaaagtgtctaatattagaggtgttcatcaaccgatcaaaaccgatgcaaaccgtggtaaccgaaccaaaaaatcgataaccaaaataactgcaaaatcgaaaaaaaaaacctaaaattttcattagattggattggttttcggatcggctggtgaaaaccgatccaattcaaaccgatccaattataaatcttatcttaccctttacctacttgggcctatttcctatcatagcccaaaaatcaaaaaaccaatacattgttctttattttgtccaatgaacgtgtttgtccaatgaaaattagaaaatggtgtttgtttttgttcaatgaatttgtttgtttatgatagatactccttattttgataaaaataagtctcataagtttttttttagactttttaaaaaatcgaaaatcgattcaatccaaaccgaaaaaaattggattggattggatcgtatttgaaaaaatttcaaatcaaatggatgatcaaatgaccaaaccgaaaagattagatcggataattttttcctccaaaaccgatctaattcagaccccgaacatccctatctaatatataaagaaggaggcagtattaatatttattttaatttaaaatattttcacttattataaaggaaaaaaaaatcatatcaacagacgaataaaatgttgattatgtctatcagtttatatattcttttagaaaaaataaaatgactaaataataaaaaaatgaaattgaaaaaaatactggttataggcttatagcctcataggtaccggcagcatctcgaagaagcgggtgtcacgtcatggaggtgtcggcgaaagagtgtcaaaagagtaaataacgtgaaaaacagtggcgaaaagagagatcgccacaccaaggtgtaattgctatattaatcatttcccgcgactttggttttcgcatttccactctctttctttatctccctcactgcagcaactactactttctttcttttccccgtaactaaaaaactcaaccctcatttcaatcgcagaaaccgatccaaacacgaatgcaacacacacactctcttcgtccctcagatccggtgccgattcgatcggagagaaagctagctagatatagcttatagggaatggaattcagaagatgaagttctatgtatctgcaaaggggattaagagactcgacgccggaaaaggatccgccaagaccactgctcctgcctacaccgtccccgctcgccggatttccaaccggatggtggtggtgctcggaatcgtgttgctgctcagctttgtgagagtggcggttttggtgctggaatcttctgcggtgtgctcaacctttggtaatttttcttttccgattcatttttttacttttggttcgtaattttttcttttttcttttactgttaactgttttgtagtagccagttcggtaaggaaaacagttgagtgtgggacaagtacatatgaatgaatttcagtgtatataatcatagtgaaaataataaataccgaaacttactatttccagcttcatttggctgcttcttctaggtccaacataataatctcaaggaaatttttatttactatctttcaaaattctcttaacgattactttaataatactggtatttttaagaaacattttgaaatgaattttttaataacaagtatttgctgcaattaaaacttttaataattattttatatatataaacacatgcaataacattctttttgttttgatatttattttttcatagagaaatgcagttgtttcaatttaattagataaaacagattctatgcatagtttaaacgtgaaatttataaaacaaaggaaaggataaaagtgtagtggaatttaaaattaattaaaatattttgaaataatattatttaaataagtactttttatctttacaaatattatgattttattattataaaaggtgaaaaaaactagtttaagttttgtgatacctttaattttttaactattaatagaatnnnnnnnnnnnnnnnnnnnnnnnnnnnnnnnnnnnnnnnnnnnnnnnnnnnnnnnnnnnnnnnnnnnnnnnnnnnnnnnnnnnnnnnnnnnnnnnnnnnnnnnnnnnnnnnnnnnnnnnnnnnnnnnnnnnnnnnnnnnnnnnnnnnnnnnnnnnnnnnnnnnnnnnnnnnnnnnnnnnnnnnnnnnnnnnnnnnnnnnnnnnnnnnnnnnnnnnnnnnnnnnnnnnnnnnnnnnnnnnnnnnnnnnnnnnnnnnnnnnnnnnnnnnnnnnnnnnnnnnnnnnnnnnnnnnnnnnnnnnnnnnnnnnnnnnnnnnnnnnnnnnnnnnnnnnnnnnnnnnnnnnnnnnnnnnnnnnnnnnnnnnnnnnnnnnnnnnnnnnnnnnnnnnnnnnnnnnnnnnnnnnnnnnnnnnnnnnnnnnnnnnnnnnnnnnnnnnnnnnnnnnnnnnnnnnnnnnnnnnnnnnnnnnnnnnnnnnnnnnnnnnnnnnnnnnnnnnnnnnnnnnnnnnnnnnnnnnnngaatatagtataaaatgtactttttttatcagcggaaataataatattatcaaatgcactcataatactatgtgcacttaagatcactaatcaccaatcaatattaaatcttaatcagtaatcaaatcagtagtttaagatgattgaaaatgatttttttatctcattgataagataatatgttaaatgcatatccgtataaaagagaagaaaaatacagttaaggtgtctaattaaaagagttgatagaatgaaagtttcactcttcatgttactttattaaattaaatgcaatttttgatctattttcttaatttgatatattaagttttaattaaaaaattaattttaatttttatatttttgcaaactctattttgatacattaagttttaaataatttattttggtctttttataattttttttgtcatactaaagttattattttagtagtagatggtataaaaaaatcttcacactgataggacatcaaaattaaacttaaatatttagcttgtttaaatcaaagttatacaaagataaatttaactcttaaatcatccttaaaatgagctcatcttttgttgaaaagtttatgagagcatctatatatgaaccattgtaattgttgcagattgcgtgggatcgacatttttcggcggaggtgacgccaatctggtagaaccaatctattattatttttgacttgtttatttttatttgaataaacaacttataagtaatcctttggataacattttttaataaattgtatgatcattaattcgttttaaggtgagctggataatactggaataaataatttttaaatttctatgatttatttttataaaataaacgcaactataagtacactaatatatatatatatatatatatatcttatttttaataaacaagcttattagtatttatttaactgtattttttattatgtgttgtaaaaaataatgttaagataaatggcataattttttaaatttaaaatgaaaatgaatttaaatacaaacactagctgccagcacggacgatatattgttcatatggggatccgcaaaagaaaaataataagacaaaataaaagtttagaaaaaataataagacataaatttttattttgtcttttttttttatcatatattcatatgggatccgacaaaaagaaaaataataagacaaannnnnnnnnnnnnnnnnnnnnnnnnnnnnnnnnnnnnnnnnnnnnnnnnnnnnnnnnnnnnnnnnnnnnnnnnnnnnnnnnnnnnnnnnnnnnnnnnnnnnnnnnnnnnnnnnnnnnnnnnnnnnnnnnnnnnnnnnnnnnnnnnnnnnnnnnnnnnnnnnnnnnnnnnnnnnnnnnnnnnnnnnnnnnnnnnnnnnnnnnnnnnnnnnnnnnnnnnnnnnnnnnnnnnnnnnnnnnnnnnnnnnnnnnnnnnnnnnnnnnnnnnnnnnnnnnnnnnnnnnnnnnnnnnnnnnnnnnnnnnnnnnnnnnnnnnnnnnnnnnnnnnnnnnnnnnnnnnnnnnnnnnnnnnnnnnnnnnnnnnnnnnnnnnnnnnnnnnnnnnnnnnnnnnnnnnnnnnnnnnnnnnnnnnnnnnnnnnnnnnnnnnnnnnnnnnnnnnnnnnnnnnnnnnnnnnnnnnnnnnnnnnnnnnnnnnnnnnnnnnnnaaagtatagaaaaaaaagactatcaaatgataagtgataacaacatattaaacatataatctattatttaataaaaaatcgtaatcaatatcttacggacacaacaaatgttaaaataatttatttaaaatttcagaaaatgggttagaaagattcagagatattttgataaaaatgatatttgactatatattctaagcttacagattaattaccatttgacatgtcagagaaccaactattttaaattacgctgaagttgaactttttatttatacatggcaatgaaccaattatttcaaattgcaagttctgaaatttagtttttatttagaataatgaggacagtaaggattgattaaattcttaaccatattatatggagactccaatattatcttataaagctgattgaaaaagctttggtaaaagcacataaatggttttatttatagctttgtaagttttaagtaaaattttaatttattctagattttatatataggaaaaagaaatatatatgaaaaatataaatgagaaaattatttattttttctctcatatttttacgtttccgtgactttcattctcgttttttacggtgatactgtatgtatgtgcatgaagaaactcagagatgagttgaccagagcgctaatagaggcaaatgatggcaatgctaatgaaggaggagcaatgtcatttaacgagcttgtgaaagtgtttgcgttaaaacaagacctcaaggcatttgctttcaagaccaaagccatggtacacacaaaatttactgattatttacgttgttaataatgtgcttttgcttgttaattactcttaggatatagtacaatgtctgacgtgtcattttaatttatgttgatatatatgtagctgtcacaaatggaacgtgaggtgcaatcagcaagaaagaaggagtcacttaattggcatatagcttcacacggtgttcctcaaagtctgcattgtctttgtttgaagttggctgaagaatacgctgtaaatgccatggcacgatctcgtctaccttctccagaacatatctctcgcctagttgatcccacctttcaccacattgttctcctaaccgacaacgtccttgcagcttctgtggttgtaacctccactgttgaaaattcagccaaccctggaagactagtctttcacgttgttactgacaagaaaacttatactccaatgcatacttggtttgccatcaactctattaactcagcagttgtacaagttagagggttacaccaatatgattggtctacagaagtgaacgctggtgttagagagatgcaggaagcaaatcagttaatttggaagcactacgacaacaactataaagaaaaggagcttgaccatagtgaagagcataacagatattttcaagctttaaagcccagcagcctttctttgttgaatcatcttcgcatctatatccctgaggtaatacatgttagttttttctttattctttagctagccctaatgctaagattgatcaaggttttaaaaaatagtagacaaccacaatttcaaagttggaaggattttgtggtgtttgcaactgcaatgagattacaatcatgactgcatcagttcgcaatttcctgtgagaacaatgctgataatactctctttgttactatttttctaatattttctttataattgaccgaaatttattgacaattttgttttgagtttaacatttcatttaataactgcttttcatgatttagaaataagactcaccaaattaaaattgataattattccacttttcctgtaatatcaaggaactaaactaaactataggactgtaatttaaaaccttgaataagattttagtaacaacaagacgaatgctcagtgataattcatgattgtttcataatctgattttttgtggaccatcacagctgtttccagatctaaacaaggtagtattgctggatgatgatgttgtagtacaacatgacatatcttctttgtgggaactagatcttaatggaaaagtcagtggttcagtgttcaagtcatggtgtgagaacagttgctgccctggaaacaaatacgtcaactttttgaatttttcacatcctatcatatcatccaactttgatggtgataagtgtgcatggctctttggcgtgaatatatttgatcttgaagcttggaggagatcagatattactaagacctatcatcaatggttgaaacttgtaagtatattttgatgaacaaaaggaagttattaggcaactgcatttctatttaaaatgtgttttgacaaatttccatatgcttcaaaatggtactagcaagataatgctttaacttcacatttttacttcttaattcgggtgtctcatcattcttaatgaacaacaacacgagtgatttgaaatgttcattaaatcttttattagtttgtatggactttgagaaatatcaagcaagtattataatgtcttagttaaatataatgcgctactagctagacacctaaagagaaatagagatataagagaaaaatgtgtagatatgtgatgcatgtggtatatcagtgacaagactgataaaaaaaattaatatttttatcactttatatatatatatatatatatatatatatatatannnnnnnnnnnnnnnnnnnnnnnnnnnnnnnnnnnnnnnnnnnnnnnnnnnnnnnnnnnnnnnnnnnnnnnnnnnnnnnnnnnnnnnnnnnnnnnnnnnnnnnnnnnnnnnnnnnnnnnnnnnnnnnnnnnnnnnnnnnnnnnnnnnnnnnnnnnnnnnnnnnnnnnnnnnnnnnnnnnnnnnnnnnnnnnnnnnnnnnnnnnnnnnnnnnnnnnnnnnnnnnnnnnnnnnnnnnnnnnnnnnnnnnnnnnnnnnnnnnnnnnnnnnnnnnnnnnnnnnnnnnnnnnnnnnnnnnnnnnnnnnnnnnnnnnnnnnnnnnnnnnnnnnnnnnnnnnnnnnnnnnnnnnnnnnnnnnnnntatatatatatctttcggtcttgattaaaacatacttcatatttattaaaaaataataattaattaatttcattaaattatgttatttttaattaaaaaataaattttttttctaaatttttttttattgaaacttgatattaaacatgaaaaatatgaaatacattttagagataatcttattaaataagatatatataattaaaatttgtttatatttgaaataaaaaaataaagaatttgtagtgcttgtatttaagatcctaggaagtatatacattatgtaggtgtgcatctatcattagtcatcttataattgagagagagaaataataattgcccactatattcaattctttatcatggagggtgctgttttcttctgtcttgtgaattctgatgatcatactaattaactgcatgtatacttgtatgatttgaaatttgacatagaacgtccagtctgggttgacattatggaatcctggagtgcttccacctgccttgattgcttttgcgggtcaagtgcaccccatagattcatcatggttcgtcactgatttgggttatcgccatcgatcagaagaaattagcaatagcatagagagtgtggaagctgctgctgttgttcatttcaacggcccagcaaagccgtggcttgaaattggcttacctgaggttcgaattttatggactagatatgtaaatttctccgataagtttattagcaaatgtaggattatagtgtgaagcgacaaagctattccacctccaatatggagatagaatcaatgataccgtatgggataagaggaaagaaggtcttgccttcagtctctgacttacggtaatgctccctgcatgtccatatatacatatatagcaaatagatgaatcaagtatacaatacgtaccctgttagaagaagctagcagtagctctacagtttaagagtatgaagatataagcatcataatccagtagtctagtaaattattttgtttttcataatggagatattgttttacttgaacagcatttgtatcttgttaattttggattttagatccttacttgcattgaatgttacagttaaattaagggttaacaaatctccgtacatattattaacccttttcggtatgattatttttaattttctagattgattctaggtatatagatgcaaaatcaattgatatagaaagcaggtgtttttaagaaggattgattctaatagtaaccgattttataaaagagtattttacattagtatacttagggtcggtccccaacaatatacaagtgtggctacagtaaaatttgagagaattttgttcactttatacgagagagctataatgttggagcctttatatatatatatatatatatatatgcgtgactttttttctttataaaaattaaaagtatattttgttttatcaatcaaaatttaagttttatttattttattctcaaatcaaccctaattatatttctctttaaatttaattatacctattgaataattaatatgaacgagaattaatcctttcctttactttaagtgcatctatataaatggatccaattattttcatgaacactagtactatatattttttatatttaattgaaatttaaataaaaataatagcaatataaattccaacgtatttaattagaggaactataaaataaaaacaaaaattaatgtgcccatagaagacactgatcaatatttaatttattttatatttgtaatatgtatctagtaataatgttttaatggtgaccgtcttaaacaataaaattgcttttggaattagtaatttttttagctttctaggtaataaaagttaattttagatgtatataccacataattttagacatatatttacaattttatcttatacatgattttttaaaagactaaattctctaaattaacttttgaaaatttatttctacataaaaataatgcttttaacatcaattatataaagtaattgtactaaaagttaaatgcgggaggagattttgagtcaaaaggccctaacaatttgatatgtgaatctttataattatgtttttgaaataagacttcctagaaaaaaacacttcaacaccaaacttttaaaataatatttacccattcacttttttggttatgatgggtaacaaagtaacaaaataataactcaattaaaataagagatgaaaaaagagtatatgagatcataatgagtgaaaagaattttactaattaagtgaaagaaagtacaacatttctctctctgaacacaagaaaagcacattgacactctaccaaagaggaaaatactactactaaaagaacggagaaactattttttttcatttttttttctctaagtagactaaataaataaaggaagaagagaaatgattttgggatgtgaacaaagggtccaccaagccttcttttatggctttggagtgcaagctaaaagcaaagctcactatgtgggactttgtccctaacagtttatttatattatactaccatttatcttataacatttattgtttttctatctctctttcttgtataaattttttgtcaaaatttgatatatgataacattaatcttatataacctcaaggatacaaacctttcaaaaaggaggcaaaggaacctgcacaattgattggtacaatttcagtgtgactccaacctggacaacaaggaacagacgccgttaacaaatgttgccgagtttggtcactatatatactgcaagaaattaaccgaggatttttgaagcaaaactgcttaaagatttaggacaacagggattactacttaatacaatttctgtatgtatgctggagggaatggacaggtctactatgtgattttttctctcacgtgaatgggtatattcttaagttatgttgaaatcacgcagccgaagagcttatacctaaaacacgtacctatttggataatttttctggtaattataagagaaaaaataataagtaaaaatgaaaaaatttatacacaaattaaaattaacttatatataatgttttgacaaaggttacatataagttaaaattaattttttaaagaagttaaaacaaaaagaacttactaattttcacctagggtgaattgaagttcattaagtttactttcttattttcatttctataagtgtttataaggaaatctatccgaacaatttattatggattgcgggcctaataatagaatgtggttaggctcgttaatgttttaagtttaggtatcatgttctcctaaaagtttaaacttaataaactcaaacatttctaacttattcactttgattttttatttttattttactcaacgtaagacttgcaacacaatcaaatacaatagttgtgttattcctcatatgcttgagaatcagaagttacccactgacctagcttaatcctcctctttgttgtatgtccaactttgaagttttaagcctgacttcttcaaaacaaggattttttccccaactagcggagagtgatcatggcatatgaaaaaaaatgcaattattcaggctttttgtatattcagaattatataattggggggaatataatggagaaattatatatgatgaataatgcggacgcccaattaacttttactcctcgataggtatagtgttaatattgaaataagcatttataacataaaaatacaatatgccaggactgaatagaaactatatatattgaaagatacataaacaatatcatatgatgtattggtacaagtgctgattagcttttgtcttgttctccgttgtaagaactttagcaaaggaatttctatgggcactctcattcacgaaacataggacgatgtaagggctaccacttgaaaggctgtggcataatttcaaatcacttatcagctgcatccaaaggtgagaatttaaggaagtgagaaacatatcaaaaaggttagttaatgtttgccatggggaatcatctgtcaaaatcatgaacttatggatttgtatataaaaaacacagcataaaaaggttaatacatctctttctaccaagtcatattatttattatttatacttgtctctaactttttctctttatattgcttaaaaaaaactttttctctttatatttaactatagatattaccatattggtgtccactcatcttttttctattaaaaaatttcatatacaaaaaaggaaaagggatttcaaaaaaagacttgagtgggagctatgatctttgaatctcgatcaaatgtgaaatttaccctggttgactattgaaaacaagttatagcttggctatgccatttggattggggagatgctgaataacaaatcctacattgatgacttaaaaacaagtaaaatgatatatatgtaagtcgaactatttcttatgttccaatgcacgttgaaccacaattttactgagagaaagctttggcgttcaaactgctaaagggcaatacaaacacagcctgagtcatttaagttgaacgtccactaaccactttcccacactaaaacccatgttgttattagccatttaaaaaccttatataatgccatatatggttgcatgtatataaaggattggtacaatgttgaaagcaattaagttgtttgtttcattggtcattgcccctcgagcttgttttagttttcatcaattaataattattaaaagggcattcaataacaacaacttgtaattaacagtgaaagatgagtgtacttacacaagttgaagagcagtctggtcttgacgtgaatattgattattggaatctatgagattaacagggaagaaattgcggtcatatgattgtgaaggtatggttgactcgcacacatttcccggtatcatatcctgttgccgttgttgtgctctctcgtgttcagctatctacatgcatgcatcatccaccaactatatattattaattatcattcatctcaacatacactttatatatagagtcttggagggaattaagagatgatcaccttagctctcagaaaattattatggttttgcagctctatttcctgcattttttcagcaagtataatgttcatgttagaagaaatataaatatcaggcataaatttacaagattttataattcccttcgtacgaagcaatcaagccatttttactttatttttcacgattattggaatttcttctgggtttatcccgtttcagtttcatattcttggtcctattaattgaaaatatgcatttggtttcaatatcgtaaaactttgatatattttctttagatactatatatatgcatataaatatatatatatatatatatatatgaagcaaataaattaagcagaaaataatagcatcgaaggaaatgatgaatacccgcttttgcatgaactcgatatcggcaaacaaagtttcatgctgaaagaattggagtgcgtagttagtccaaaggaatagagacattctaacttggaattttcaaaatactaactgaaattatcttaattagttgctagtttttgactaacttcttgcatatctacataaattcacaatgcctatatatttagaagcttaagatgcttcatgctgataatataatacctttctggatctaactctgcttaaacctttctccagtctactttccaggttctttaattcctttagactcagagagctaagagcttcaccaaggatgtgcctggaatgcaaaaaatcacattgaattttttcatttcaatggagaagtctgctgaataatatttttaagagaatggaacattgacctgtttagattctgaatgtctctgatttgtctttttaatttggacgcttcctgctgataaaactggtattgataaatagtgtcaaccagttagagaaaccttgtggaggagcattatgatatagcaattaatttagtgataggagaattaaaatttaactagaacacagaataaggtatatataaaacaaataattgatttttcagtgtgatgatttgaattatgtgttgagaaacatgcatgatacagtctatagagctcaagtgaagcgagaacatgaacacgagagatattaacaaaataatgtgtactattgatatatcatgagagagaaaagtaacatacttatatatatatatatatatatatatatatatatataactgaaggagaaactaactaatttaactgttatcttgttgagttaatagataactgattgctaactgtttcaacctgtatataatctatgatgttgtaaaaaataggttaaatttcgacaaatcatcctaaactcatgaaaataggttgagttgcgttatgcaattatatgttaaatttacataacttgctaactcaatgggtcaaaaggtggattcttttgtgaattattttgttggaattttattggacataattttattaatttttttgctaatgatattagcatgatattaatttttcaagaactgtgaatatatatgcatattataccaataagtgttgattttattgaactattatttattttgttattttgttgctttactttatattttttcatgatgataaattttaaacaacatttatactaagaatatttagtaagatagtattattatgataatgacaatatatttagatttttttaaagtatttatttgttttatttattggataagtctgagttaaatattatatatatatatatatataatatttatatatttaaaaacaattatggctaattcaatccaacccataatgcactaagattgggctggatcgattgtgattttcatcccattcttaaaatttgtccaatccatttttaattttatgagttgagagcagattaaattggattgaattggtttgatccattttaacattgtctagtgtgtgactcatcatacccctcaataccaaactgtcaaatattggtgaagatgtcccttgaacatttgaactcgtaaatgtcacattcaaaactaagcattagactattagagtatcctaatgataaaggattttagtggctttgagaagattgtagcttgaaataattaaccttcacgctgtaattccattaagaaaaatatgccataattttaaaacaacatttattctggaccaaattaaccaaacaagagcattttctatcatttctttgatttttttttagcttactacctgtgtattagcttcagagacagattctgcatttgtggaagcagcacatgctttcttgtacctatcgatagttcctctaacactgcaaaacaatacaacaaatagaaacataaaaatgtgataaagtacatgctaattttaccaaaacatgtacacagtgacgacttaatctgtagtttacaaattaattatgaactcatcttctttgacattaaattcttaggccaaaaagctttgagattgtaataaaaatgggtgtatctttataatttagcataaatatgtttttaatttctataaaattagtaattttgatttttgtccttataattttatttttaattttcatcctgcaaaaagttaaattgtgacattcgttaataacttatgtgttcagcggaatgtcaagtgaccctcccaggtaacaacagctagtgtctatatatatatggtacaatgtcaacatgtaatatcttaaaaaggatttctagagattaaaaaaaaaatgttttatagggaccaaaattaagatttattcatattttaaggggaaaaaatcaataattttaaattttaaagggatggaaagcaaagaaaaaaaattataagaaccaaataacatgctaattttataggaactaaaaatatatttaagctttataatttttaatttcaatgtccattggaatctatgaaattgacaaattacattacatctattacatgtaagagaaatactaggaacaaattatctaacacattctttgttattgattgaaaattattacaaattataaaattctgtgcatcttcttatctagtgaatcttacccataattataattaatattaaaagaatatgttattaatatttctctttcatataaatagctcagtgacctcttgctttaatttatttgtttaccttacagtgttaggccctctccaaatttttctattaagaacacaaaaattaacaagctagttgattgagtatggttaaatacacgaagtttcattcttttgataaagaatggtaaatcccatctgtctgaacttctctaaagttcaaatacaaagtggttatttactgagaatgcaggaagaggtcgatgttgcatcagtgggccggtgtaagtttaactttctctttaattgaaatgtccaaaacacatatataatggagagaataggtaaagaattgacgtcaggaatgggaagctttattccacaaagatgaaagcaataaaaacatatgggaaagagaactaatttgcctttagccattcttagaatctgctatcatcatgttacttttagctacttagggtaaagaaatcagaagcgcagaagcgggaataataatatctaaacactatgatatattttcttaagaaatataggagatgaggatgagaaaatgaggttgtagtttctcataaaaattgtttctctacacttctaaaaatatttatttctcctaaaagttgtttctctacacttcataattttatagttttatgcacaaaatcaaattcttgcacacgtttgccttttcatcttaattcatttgttttttgttttttgttttacgtacccaaaagaaattcaagttatttaaagtaaaattaccaaataataccctatgggctgggaaatgccctaaccatattagactttcctccattatgtaaaggacaaaatttacgaaaatgggaaacaaattgggacatccataaccctcgatatacttattagtttaaaatgatttactttatgctcaaaaagagtttataacgattactttagtaagaattttaaaaaatattgaagcattatagactaaaaatgcccttaattaattataaacaattaatcctgtgaaaattctgttgcaactttaaagaaaactgtacccattttgaatcaagagccctaatatctgatttgattgcttcttcgtgtaacctcattgtacggagataaaaatattcttaaaaagagaaactatattagtacagattatatttttgtatgtgataaaaatattatacaataaaaagatatatatatatatatatatatatatatatatatatatatatatataaagatgttataaaaaaaatatacaagtttgctatgtgaataaaagtctgaaagggttatttagtttgcagtttctgcgcatttcccactgatctatctcattagaattgaagtggtcttcctccaactttgtgtacatatgtaaaaacgaattgacgtgattgaggtgtgactaaatactaaatagtgaaaagtctgaaaccctaactcccaatcggatgagatgcttgtgttgtgtcactatacattgacaaataagtggtattaaggaggagtcaagatggaaggggctcattgagtgcatgacagctttgtgcagcagcccagacccttttaagatttggtggatgacaagtggagagagaaactcaagagagagggattggtaaagcttaacaatagcagatacaccaggaagctaagatttctcacctgcaaatctttgtaaccctaactaaagctttctcttcatttgctacatacttcatattgtttcaccttaacgtctataatttctatcgcttacacagatctgcacccttcttaacaaatcactgggaagacgcgtgatagagcaataattaagtagaagagttagaaagaatgatatatatatatatatatatacatggtgaacctagagtattcatcggtcagaagttaaaaaaactaatttttcaaagtattaatgcttgtttaaataattagcctcttttattagacattttttcatacatataaattaaaaaattaaacttttaacgacatatgattatctactaactatgcgtttcagttatatatgataccacataacaaacaaaaataatcataataagaaaaaaggtcttaaccccatatataaaacccttgttgtttctagatatggtttgtgttatttaaatggttcataagatatgaaatgagattgaaggagaggaaaagtactgtgttgaatcagtagtaaaagaatatttgaacctgttgttggcatactcatagaggcgtccacggcttgagaagacaacaagagcaacctcagcatcgcacagaacagacaattcataagccttcttgagcaacccgttacggcgtttgcagaaggtgacttgcctattcgttgtgttctcgatccgcttgatttctattttccctcttcccgttttcttctgtgaacacccttctgatattgcttcgttgggaaactccatctatggctgcaaccagagctatctagttaaaaaatttaattagcaaaaaaaaaaagtaaaacaccgaaagttggtatttaatttggagtatcacttcattaaggatgcatgaaattaattaggagaaccaaagaagaagctttggaataaaaaggtcattaaactataagctattaagcttgtccttgatatgaagataataatcaatcaaagacagaatggaaagaaacaaggggtgtgtatctagctagctaattaggttgtacctatgcaatgagaactatttgtagttctttggtgttatgcaacatgtgaggagaaaatgttgcaaaatatggaagtggggtggcctatgagacaggtatttatggacagaaaatagaccctccaactctcagtactgaaaataataatttggtagtaactccttgtgtaatgtttggaaaataaaagaaaaagggtatagtgagaaggggtttgggatttcacctgtcaactttcatgctcaatgtattaaccgttcatttttcttcgtgtatgggaaaaaggtgaggggggggacaatgaaagtgtctttttgaaagtgactttgttaatgagtggggtttcattcaattccaatgagagggacgtgaacgtaagtttgcacgcaaaaacttggaaagcttgaatttttgaagcatagctgcagggttgcttcttggattttgagttttggcattttatcctgctagaatctaatctagatttgtttccctccacttcagccccgtttctctttctctcatgcttgaaacctgagttttcaattgctcactcaacccaactcctgcattttttgaatttagacaaattaagtttggattcatgttaaatgatttagaatcaccttgaaatatcaggtaacaaaattttaaataatattcatatgtttgttttatgttaaaaaatcaattttgcatctggaattgattgaattgagaaaactttaagtgtgtggcatggtgtcagattagatgctctataatgttgaaatatcatttttagttaaataaatttttatgttttcacattaaagaattttgagttttagaattgataaaaaaaacatccaaacataaaacatataacttcaaaatcaattttaatgatacttagaaatacactaagtaatttttgtattgaatgaaaaattttataaagttttactactaatgtccatttagaataaaaaacatacaaatataaattatatcattttaaaattaattttactaaatctcatctaaacacacgtataatatttgaataagcatgtaaaattgattttaaattaaattaattttaattaaattttttttaagtaaacttatttatgtttgaatgtttgacaataagttagtagtaaagttttatataatttttcatcatagacaaaatttatctaaaattactttaatttaaaattaattttagactaaaaaataatttatcaaatatatgtgaatattgcgcactatatttacatcttaagtatttgaactaggtttattaatattatatttcataggtctttttgttgattttatacatatttctttccatttagatagcaacgtaatattgtctatttttgttaatacaatgtttcttaatttacgatattatatgaattaagtcatgattaaaaaaaaaagacaaatacttagtgtaatatcattaaattccatttccatggagtgttagtatgattcattatttttttattgcagaatttgaccaggttttatgttgacgtatttgcataggcttcaatatataccttgtattttgggtaatgggaaaatcagagttgtattctcagttgcaatttttctttcttctcgtgactttccagtatcttgttgattaaaatgacttggttaatatttaaattatcttcattaaaccttttgaatttggtgttacaatgtgttaggacacagcggtgtgacctcacatgacccttgtggagttatggtgggtacatatatagactcatcatcaggaacaaaatatatatctatgaagttaaaccattgtatttgtttttgttgtttgagtgtctacttgcatgatacgagactaatctttcaattaaagattcttatttattagtgcatgcacttctcaagtcccttcagtcggatttcgtcattaggctcagttggagctccctttgttccatgccctcgatcatgtatcgaccaaggaattcttgattaccagttcagcattctactttttgcaatgcttagttgttaagcaactttaatcactcgcccgaggatctcggaacaacagatagaatcacacactatactcttgcaaaagtatcggattgattagttctgatgcaattctataagcttaacctaaaaaaacaattacacctaatacttgaatgttcttgaattagatctccttctaagcatgatctagttaaaggaacaattaaaaattacaatttttttactataatataaacacatgttaggttgatgtaattaactaactattgtattatattgaaggaaaaaaaaaactaactattgtgtttaaaattaattaagaaattttaaataatataagcttttatggagaaaaaaaaaagatactactaaaaaataaacgttgaagttaatgacagaaaatgctaatttcataacacggttatcttcaagttttagtggcccgtttaagcccttgttttcaaatatatgaatgcagtttataaggtgtgcatgtgtaatagttaatcgaatttatttaaaataataataattatttttttttcttcagattacataattagaatcaaacttatgactgattaatcatacatatgatgatttcatcaaaaaaatcgtacctatgatacataaagagactaatctaagtagggatggcaaacgggccggcccgcaaaaaaaacggggcgtgctggcccgacccacgaaaaatgcggggcgggctggcccggcccgcttttgcaaagtgggctacaaatgctagcccgccccgctttaatgcgggccagcccgcatcaaaaatttaaaaaaaataaaaaagtcaatttaaaaaataaaatacaaaaaaattataaaaaaaatacaaatatgataattaaaaaaaatacaaagttaaataaaagtaaataatttaaaattaatgctaaataaatgatgtcatgtgataattcacaaaattataccatttgcaaatgaaatttacggttataaactgtccaaaagtgtaatatgctagtaatgaaagactatttgaaagtatcattatcataaccattttaatattaaaacttaaaagttaattatgagagtgcaaaagagtataaattaaaaaaatatacctatttcaaaatatgttaaatatatttatttaattttaatatttaatatttaaataatataggcccagcggactggtccgtcccgccccgcgtttggcccgcaattttacaggacgggccagtccggcccgcttttgatttgtgggttgatattatcaacccagcccgcatttttttgcggactaagcggaccggcccggcagaccaagctcgatttgccatccctaaacctaagttctgaaccaattaattagtcaaacattcaagtaatagatcatagatgttgggcctaaatcccgagcataacctttacgtcaatgagctacaaattttcacactagaattgaagcatattgaaatcttttcctgtgtttaaactccttttttgtttcttcttttaaccgtgtgtttctgcatttaatcaaaatttacgtgtgtcgaccgaaagttagaaattataacttctgcgtaacagactcaagttgacgtgatatttctcttgatacgtagtatatataaacatgagtgagagttttatatatcatttatgatagaaccgatgtttcacactacatctgaaataaaaaccttagtcgtttattagatctatatctaatatatatcttcatatgcacttaagtaattcgtttttcacttgtgaaatcttcactcacttaaaatagtcgtgcatttgacatatttgatgaaatttatagagctgtcaatttgagatagtccgatctatttgtattggtcaatcaaggagcatgcaaaaaaaaaaatggtttagctagggcagnnnnnnnnnnnnnnnnnnnnnnnnnnnnnnnnnnnnnnnnnnnnnnnnnnnnnnnnnnnnnnnnnnnnnnnnnnnnnnnnnnnnnnnnnnnnnnnnnnnnnnnnnnnnnnnnnnnnnnnnnnnnnnnnnnnnnnnnnnnnnnnnnnnnnnnnnnnnnnnnnnnnnnnnnnnnnnnnnnnnnnnnnnnnnnnnnnnnnnnnnnnnnnnnnnnnnnnnnnnnnnnnnnnnnnnnnnnnnnnnnnnnnnnnnnnnnnnnnnnnnnnnnnnnnnnnnnnnnnnnnnnnnnnnnnnnnnnnnnnnnnnnnnnnnnnnnnnnnnnnnnnnnnnnnnnnnnnnnnnnnnnnnnnnnnnnnnnnnnnnnnnnnnnnnnnnnnnnnnnnnnnnnnnnnnnnnnnnnnnnnnnnnnnnnnnnnnnnnnnnnnnnnnnnnnnnnnnnnnnnnnnnnnnnnnnnnnnnnnnnnnnnnnnnnnnnnnnnnnnnnnnnnnnnnnnnnnnnnnnnnnnnnnnnnnnnnnnnnnnnnnnnnnnnnnnnnnnnnnnnnnnnnnnnnnnnnnnnnnnnnnnnnnnnnnnnnnnnnnnnnnnnnnnnnnnnnnnnnnnnnnnnnnnnnnnnnnnnnnnnnnnnnnnnnnnnnnnnnnnnnnnnnnnnnnnnnnnnnnnnnnnnnnnnnnnnnnnnnnnnnnnnnnnnnnnnnnnnnnnnnnnnnnnnnnnnnnnnnnnnnnnnnnnnnnnnnnnnnnnnnnnnnnnnnnnnnnnnnnnnnnnnnnnnnnnnnnnnnnnnnnnnnnnnnnnnnnnnnnnnnnnnnnnnnnnnnnnnnnnnnnnnnnnnnnnnnnnnnnnnnnnnnnnnnnnnnatgctctataataatttgtgttttactctcagataagacagtggtttagatgatatatatgttcgggtaattgtataagttattattaagtttaaatttttgtacataaaaaagaatttaaatatgaataaattattaaaaggaccaaacctggtgagaatgtttcattacaaagtaaaaataatttaattacggcggtttaaaaaaatggatatactgttcatccttgctcccaaaactctattaggtatagaaattattacatcttcattaatttctaagtgataggggcaggcagatattataagttattagcatacttcaacgagaatatatatgacttcgcaaataaaattgcgcatttaatcattcattatatattatatatcttttcatgtgcatatatacaattaatatttttttattaacaataataaacttaatcacttgatataacatttagtcgtacttaaaattcattattccttctttcgaatatattatgtagctacacttaaaattcattatagggattaaatttatatccttctccacaatttagcttatgttgtgaattgagctgcactcaatgcatatatatacaattaatatattctcaccatttttgaattggacagtttgaaaattaaaagcacagataaaagaagtagaagaagaaaaaaaaaaactcttcattagtttaaactactttgattagtcttacttaaatgtctttcacaaagaaaaaagaaaacgattttgcaagatcacaccatctaattcattcactgatgaatatattaggaccctctttgcaaacaatttctgtttcagatatcaaatatcatggaaaaataaaagggccgatggaaattaatgtaacttcaataacataactaaataagcacatcgttgagatatgaatgataaaagttatctaccagtactacttccatttggtagtatgctatagaagtaactcaaagaaagagtaggcaatataatttgctcaaagaaaataagcatagtaattaattatctatatttcccaacttttcttctgtctgcctgctgccattgattcgtgagtataagatgatctaaaatgtatcatcaaatttgtctcatgtaaaatccactgaagatgcggaccagacaaaggaaatctttctcaattcctaatgccctatgtattttatcaaatgcaatgagtttcttcttctttttttctcataaaaaaattagattaattgaggnnnnnnnnnncatacacatcgcttactaataaaaatctgatgatcgaactcaaatcacaatagtgtgaacgaaacactcgagtagaagttttggtaatgcaataatgagtttcttttaggtacaatgtaaactaatattgtatttcgggaacgcctatagcttgccagtaactagtgccatctaataatttcataggcatattcatcgatttagttagctgcagtgtgaatggtccctagccattatttagatttcattctctagcaacatatatttaattctataccattgttttgttgaaccttacaaattcaaattttccccatgcatatgccatctgttctgaacaatttaatgccaatattaaggctacattctatgtcctagcctcctacgtacgtgacctaacatcataaaaggaaatttgaatccttgaagcttcttctttaaggaccacgttgttctaacatggaaagggttttgataataacccattgataagtgcaattattccttcataccaactcataatcatggtgtctgaaatttgggcatacaatcatctttttcttgacaacttctgatcgatcacatgagagctaattaaagttagttgttatgcatttatatgaccattcaacacttacaactacgacaattaacaggtatttccaagagaaaaataatttccaatacttgctaatataaatcagaaggtctatgaaagcataaacacttggtgattaaattagttagaaggtaagaccatcacgtagtagttttaaacgtgaaaaattaccccaagtattttatcatgttagctacgagcaagtaataatgtttgataaagtaaattaacatttgatgggtctgtttggatgttagcttctctagaagcacttctagaagaaaaaagtatgaagaaaaaaatgaaatgagctttttcataagctaaaataagtatttcattaactaatttgtagatgtcatctcatcttttagagaagttacattggtgagcttctacaaattagctaatggaaaacttatttttacttatggagaaactcatctcatctttttgttcttatttttttcttctaaaagtgcttctagagaagcttacccaaacatgtccgatatcccttacgactgaataagtgataagctaggaaaagaagaaagataaataattagtgataagatgtgacaaaaatgagagacgcttgaatatagtgggtgtctaaacataaacaacaatagtatttacgcctttctctcagttctctaattttctttttaggtgtcaattatgactcaagtctccatggatatttttccgaccaagtattatcttttatggattgatgacgacatgaaaaccaattctttatactcgcattagaaaaagaaaaaagatcaggaacaaggattttttgaggtgggacagagtgaagaatgtaggacaagaacaaggattgaaacacatacacgtcatttctacacttcaactatgattgctgagaatctttcatgtgctgaaaatcgtttacttgcgttgaacactgattcctagagatgctagttatttccttgcaaagcctcacattatttcagtaaccatccatacattgtattggatgtataccaaaatcttgcttcaatgtgaatgggaatgtacttgactcaaatgcctttgacaattttctggccaaaaaactagttacttcttgtacgttgaataatacattcaacaaactgctcaccaaataagaagttaatggacagagccgcagaggaataatttgatcatcatcggtaaattttatcacacaatttttttaaagtcagcgcttacggagtagattcaatcttattgatgattgtggatttttaaatttaagacaattgaggattgaacatgctagacatgctgccacaatacaattatacaagttttgccagaaacgaggttgttgcctttatttgactatttgagtacaccaaaaaacttgaacttcttttacaaatttcatcatgcatatatagttgcagcaggacaatgataattgagcaggctacttctaagtggattacaaataagttagtaccgactaaaaggagtaaaactgtatcactcctatcgaatcacaccaaaatgaaatagatcaagatgttgtgtagatatgagattatacagttgatgatgaattaattaaatttaattgatattgtctataccaacaagatatatctatttttcagtagtctgtcacttaagaatttcacagttaaacgtgtttgacttgaaatagttatgggaggaatgaccttctaataagttttccgaaaagcgtatgagtaaggacaaagcatgctgaatagtgttgtgttgatatgcagcgacagtcattgatactcaaagcaatcaaagtatattgtcgaggttccgaaaagaactatacacgaaaggttataatcaatggaatgttatagtgttctaagccgtcgagaaatccacaattaaaaatattataataacaaatacaagtaaaacatgtaagtagtggactacttactattcaaatataagaacagtaaaatcctatgatgatgataatagaagtaatagaactgagagaaccatatcactgaaggttctaagagagaatatataatagggaaaaactttggaactatctatgaaagttagtaaaatggaaacagggcacaacaataaaattgtatcccgaacagaagaggcacatatgcgtctgataagcccaatggagaaaacaaagttgacaaagaaaaataggataatatgttaagaatggctagtaaaagtaagtcagaaaaaaaaatgctttacccgaatttgttgtcttccaattgccctacatcgtctactccggtaattcatagtcatgccaatgaatacataatgtatggaccacaccagaacagcaatattgtgatcatagttaacagctgtgatttgtgaagcacaagtcaaaattactaaaacactagtagccaattgatgattgattaggtgagggaccacgactaaaaaatacaacgtaaggagttgaagcaggacaattaattcattgttgaaaatctcattacaaagaaatcaacactctggcatgggtggaatgattttgtaggaaacaaaaaaatgtgtaccgtgtacgtgcgagacgaaacaacttgttaacgtcatttaaatattatccttttgcatttgctttgaattgattaaccatggaattagttgggggtatacttgcaacattgcaaccctcattcttcgttctttttgttggttgggatcataaaaggaaaggaaaataaataactttttctatccaatccctcattttttctttgtgtagcttatcgtcattggtcacgaccaaagatattttcgtgatctttaaaaaaaaaaatcaattcatcaaccttaataggatatgtttgactgtcaacacggaaagatccataataatctacaaatcaaactacatacaacgaacaaatttgtattgacaaacagtggacatgacttttgctctatttctaatattctatggatacacacaacaaaaatgatttattaaaaatataccagtataatttactattaaatttatatgtttatcaaataatttcaagaaacggaaataaacttcttttatcttcataatacttgtttgatatttaaatatttaaacaatactccatctggtccttattactataaaacattttggacatcaattatacaaaccaataaaattaattaattcaattgattctattgaatttatataaaaaaaatactactaatgtgtcaattatgtccttattaacaatcattaacttgttatggatgatgtgaaaacattaaaatgctagagtattatacatcactatcaataaaaaacataaatacttaaaagacaaatattaaacatatgtctttggaatattggttaagaaactaaaataaaataaaatgatatcctatgttttacataataaatacttactcattttaatttattaatcaatgttacgagaacactaattaacaagactcataattagaatatttgataagatcaaccaatgaaagaaaaattaaatattttataaaaattctaaaatctcttataaaaagtatcattcattttttcttaaagtatctcttatgataaaggagtagagtgagtaaaattgatgtgaattaaatgtgttggctaaagggcttattttccattgtttataagagtatgagctaggtttaagtggcccaataatattatgctctgaaaccaaaaaatggaggcccaataatgagcaggttttccaccgcgcctccgtgactccttcctccttttgagtttcattacattgttcgttgggcccaccaaaagcactcaaaatttcaaccatgctgcaacccttacttcaagatgcactcttcgtaagtccttacttttttattctgcttcaattcatcccctgtgtttgctccttgtttttcataaaagccttcagtttatagctattgagctctcttttttttctgatgaaaaaattgcgctttataatagtcaatctgaagttgtgaaatttcacatattaagctttgtgtaaatcggtaggccaacgtatgcattgcattcattatgtcatggatagatcccctcacatttttattgacatgatatatatatatggtgggagggaatccacttatatatagagagagtggggaaggaaaaaggagatctcaagttattataaaaaaaaaaatttaaaagaattattttttattctaatcatttattttcttaaaatctaataattattataactctaaaagatttactctatattccatgttgatgaggtgatttttgcatggtgaagtagtaattaacttgctttggtttcatgcatgtgctgaaaaccaaactagtggaccgttctttgcttggtggattaaggaataacaacttatctgtcttattaacatcgcatgagatagcatccagcaatttcttatctcaggtcagtttatgaattatggcaatatcatagttgtgaaaattgtgatcatgagtgatatttttaaggacaatacttgtcaagttttttaggtgttttacttttttatgctgtcattcaattagaatcagtttcacttccgtaatctactcgtagtaagttttgcattaaaggattacacggattatcaagataaaactccaattctaatgggagaacagcgcatcgcgaacaatatctaaggaactatatatgtaagttttgtcctattttcagtgacatgttatttatttttcttacctttgctaaacttagtcatttgaagttgtagacaaccttgtaatgcaaagatgccagacatggattagtgactgactgactaatgaaaaaaattgttttgctttagcagcaacagcaacgcaagttcatacagatgggaacggttctgaaggtggttgataactcatgagcgatgtgcattcaagaattgaaagggaagaagggggcaaggttaggtgacaccataataacatcaatgaaggaggcacatccgaatggaaaagtgaagaaagaaaaggtagtgtatggtgtggttgtgcgtgcggccatgcatgcaaaaggggaaggtgtgatgaaagtgaggtcaagtttgatgacaatgctgtggtgcttgtggacaagcatggccaacccattgggactagagtttttgggcagaagaagcatgtcaagattcttactttggctggccatattgcttgaatcagcttagattttcttaattttggaatcaccccttcactttttctgattgaatcttttggaatttgtgtgtaaaatgtactaactgtaacttgaattgatcgggctctattaggcaaaagagaaaaacgggagtgtacaattcatgtcatcactttagggaaaagagaaaaacagatctattggaatttttacccttgaaataacaagtagcaagtagcaagcaaatgggatacaatattcttgtttgcttcttgtgtggaggagttattatgttcatgattgcatttgagaaactttttttcatagatgtataggtgtgttattttccttttagttatattaaatcgtcttgcctgattatatacgaagttaattttgtaaaattagagtcaatccgatgatcaaatgatcagtgcctaatctttgtttttttaatggaaccgtgagtggataaaaattactaataacgtattaacgttattcaaacatgaaatttcaatactcttttaactttttttctccctttttttcttatctatatagaaaatgttttacatagatacaagttgttgggatcattcatgacaaaagtccaatacccttgctctattaaacaatttttttgtataatatgaattttataaattaaactattaaaaattcgtttatatacaatattatagtatttatttatattttaaaaaaatattatagtttaaatgaaattttttgattaagtattagttaatttttaaattctgcaatttattttataaacttgacgtgtttaataagatcaatttatagtaataaaattagcattcaaaaagaggtattgaatgcaataagctggaaaccataccaaaaaaataaaataaaaaatcatgataccgtgaaagaatttaattctgaccattattaaaatggattatcaagattaaatttaagtcaaataatcctaaccacctactatatacttatggtcaacatgttacctctcatttctcactttcccattagatagttgtatatatttttttaatagaagataattttcgtataatgataataatgaaatttgaatttgtcatcttctacaaattattcaaactccttttcactaacaagatcctagtgactcaaagcacgttcttgatatcgttcaatcttattaattttaacattttatttgtttgcttgaaatcttattttaacatttgacgtactatattaataaaccgaagagatatcaaattgtattaaataatgtgacaggacaacattaagtacaagtacaaaacttttttatactgacattacactaaagaggaaattaaaatcatgtatacatagacacatatttcagaaaattaagaagagagaaaaagtagattctctcgggaccctaatactattaatgtagggtttcaattaaattgaatttgatgggtactattttgtcctatatactaaaggcttaaggccgtagtagtagtactttttacgcaactctaccgagactgggagaaacaattgaaagggtaggcaccttggtaacatttaatgccacaacgacaaaagcttagagctcaaaaggtaatacgataactctcgaatatgcaccaaaggcacatgaaatcccaaagttttggcatccttatattcccctcccgttttgttacacatatagtataccttaatctttatggtctctttcctttcttgagagaaaaagaagacttttgggtcattccacaaacattcttttcctttccttcattcatctgctactacactaaatatatacatctttgcatgcatcaataatacaacccatattccttcaaatcttcttaaaacttgaatttccccaccaggaaatatctcaatatcgcagttcctacatcatgggtgtccttggaacaatggcaagacatttggacacaataatagggtgaacaaattaatctctctccattaatttgcttttaaaaatatctgtaatttgtgtcgtatatatattttatttcattccactcctacacatgcattgctatattatatctgcgccttaacagaatatatacttttcacacaatacctgctaaatcccatgtacaaaactcatttaataaaaaaatattcaccataatatgtattctgcaatttaacacacaactgtaactataggtttttcattttatgtttttccccgtaacaattaacagccttttttttttttttgttttctgcatgccaggcctggagtgatgcttctttatcctctgtaagtatagtaaatgccatatcatattatcatgcaatcgtgtatcattttctcttcctccggattaactgctgtaattcttaattaacaatcaataaaaagaaattaattaagcatcctacgcagaggcatgcatgcacattatcttatctgtattaattattacatgatatgactaatcatcaaattcttgactacttctgagtaaatatcatagatacgcatcaatgagagcaattgaaagtccttcaaccttggatgatcaacagtggctaacgtattgggttttatactccttcatgaccctctttgagctttccactcataagatccttgcttggtacgttgacatcaatttcatgtcaaatcaaactatatatatatatatatatatatatatatatataggcacataatagtaatttaatatttgaactttgccataaaaatatatacaggtttcccatttggggatacctgaagcttatgttttgcgtctggttggtacttccaatgttcaatggagcggcttacatatatgagaattacgtgaggcaatacataaagaatattggaagttccaattattctgaggagtacaagaaggtccttcacatgatgaccttcgatgcaaggaaagcagttgaacgctataacgatagatatggccctgatgcctttgatagagtagtcagagcggtatgatacaaaacaactatgaattgcttcatcgtaaagctcatttacatatctgtgtttttaacaattttttgttaactttcatatgtgcaggctgaaaaagaagcaaagaagcgatgagtgaggaacgtcaacattgtgaaatcgatacttctttctttgtatattttaacatgaaggagacggaggaatctattgtttaattaaacgaaatggcagcgattatatgcttcatatattttatgtgtatcttccatggtttaagaatgtacgtaagggtattcgatctagtttgatatagtcattttctgatttagttaagaaacaaaaattatttggttaaattacctcagtttttcgctaaatcctttaaaccctttaacgagaattctactgcaacggttactaattggtttcctctaagttccttcagcataactattaactacacatacccacaaactcatgcttaattgggataaaaataatggaaaagcttagcttgacgatctcaaaaaccataatgctttcataagcaacctttattgggtaatactcatcttcaaacaaagcaacgtacgtaatagtcattatgtataaattaaagtggcggaaacccaatcttataataaaataaaaccagttcgatcagcctttttccttcaacactttggcatacactatatagtaacttttttatgcatatacactatattgtaacttttttatgcatatacactatatagtaactgatactgtgttgaatgaatgtttttaacagataataattaaaatcaggaagaaaataaaaattgaaacataaaatcatgcactcgtatgatgaattatcctacactcttccgattttttatgtggaaacattctaaaacgtaacaacttcaccccctccgtattttcacttttcatacaaagatgctgttggttattattttctattacttattagcatcacttccacctcagcaatacataattaagtttaaaatacaaaaaagtttggccgataatacttggagaagtatgatctacaagacagagaatcaaacaggaggatcgactgcaatactttgcctactaacttttttttggattttgataaaattttgtgtttatttcgtgttgcattaataaaataataagcgttagtgtaccggcaattaaagaatatctgacacataattagctcattttgactcaaatgaatatgaaatccgtttaaatttaataaattcatcaatgtaacatctcctttgtaattgaaattggaatgaattagtcaaattgatttatttaatatattaaaataattacaaaaacgtaattcagtttaaattctctcacaacttaagacatgaatgcaaattgaaactatttttccatcaaaagcaacttcactggattaaccttttatattcaaagcagcttgtaatcattttttttttttttagaagtttttaaatgaaaaataataattttttcataaagaatcaaagccgggatggtagaattttttttttcttcataatttgccagttcaaattaatgaggaagtatccaatggttaatgaataactaaagccccaaattcaagttttattgaataggttaagagagatggactattcccttatcctaaagcccatctttctttcctttctggggtatcagtaataagcacatctttgcatagtcattgaacagatgccatgtggggaatacctggctcaaaaatagatatccaaagcgtcattattcattggagacaaaattctgtaaagggcataaacttcaaaactgagagctggatgtatcgaaagactggatggaattatatcaatttttccacacgtttcagcaacctggcaatattgatacatggataatcctgttatgttctcaaatggatatatactatggaggaggaaaagcagatatgataaaatgatataacttacacctaaaatcagtatactttagtcaattttctctgaatttctatatcactaacactgtcagtaatcgcaggtgagaatatggcagaatagcttgtcatcctgatccatattttaagaggaatttaagatgtgctttgctcttttaggaccaagtcggacaggacctgatgttaccatgccgtccagtttaaaagaatttacagcagaataacttccaggatttagattttgtgcctcatgctgacaacacctactcctagcactgcccatgtgcggatccagttcgagtgctcttgtgtttcgttgcaattccacacttgacttttctccaggcaacctagtcatacgactgaagttttcttgcactcgtatattcggtaacttggtaggttttctggaatcatcaagattggctgcagctgcaggtctctttctggtatttgtgcacagctgatggtcatcaaacttcaatctgtcagcgaccttatttatgtttatattaccactatttatggtagagggtgtaaccggaacatgtagtggatgaccaattgatactggagaaagaggagtcgtctgcatgggacctagagaagaagtcagatgattagaaggaaagcgaacttctgctgaatgattcacaaatggcgtagtgaaattatttccccacagattttgaggaaaattttgactacttgaagcagaaaattgccgagaaaagatccctggtagcatttcatctgttgagattgacaaccacgatggtgaacttctgtagggactatcaaaccaagatgttttggcctgttcattcacagttggctgcaagaaaggaaatcctccaaaggctgattttgtaacatggggatttttgttcctgtcattcagctcaccattggctacatgagtcgagtgactaaaattgccaggtgtaggtagtaccactaattgagaactcaatcctagaggtttagctccaggtataaactgctctgaaaagtcattggatgcaccattaaatactgcataagtagacttttgagtaatgggattgaaataagaactggcatttaagttgactccatgattactttgccgaccaataaactgttgagagaatccagagtctgtactgctcatcaatatggtgccttgtgctgcttgattgctttgaaattttgcggcttgcaatacattgtcagctgatatttgtataggtgaaccagatacccaatcctgcttagaacttctttccaataaagagtgatctaaagcagcatattcagaataattccttcttctggattcctcatcaggccaaacatctcctgcaaattgttgcatctcttggctgcttctaccaattggaacatctttacccatcaacctcattgttggttggctggaacttggtgagatatgatgtgaaccttctttcagagaaatcaccccatttccattgtgattccagacccggtcacattgattctgttcaatgaacgagttttccttacagttcaactctgaattaagtggtggaacatagtgactggaacacatatctgaagaattaggtcggttgatatcttctctctctctagattgtaactcagtgacaggtaatcgggctggatgatgtggaaatggattaagactatcttttggaaatgtcttctgaacaacatgattctcattaatgcttaaattttcctggttactttgatggagaatattattaatgggtaagccactaaaagaaccacgtaacgtacttgatgtatctgactggttcatccctaagtttccacttgaactgaaattgattaggtcaccgtgagaattgagtggcaaaccaaaaaaatccggatccaaacagctatttttgccacttcctttctcccagcctgtattggggaatgagttatcaatcatatctgcagaaaacatacgagaaaattgcctacccaaggcctcgccactgttatctttatctccacaagtttgcaatggagattctggtttttcatttgcattatatgaagcagaataagatgaagaaggctccagaaatgtctttgtattttcatttgagttaacagcatcaacctgtggatcatccaagtggttgaacttcccactgtagctgaaagatccagattcacacatctgtgtatttataccagacatctgctcttcttggactgctaaaagaggtctagaaatgtcagcatacggagaacaatgcagggtatttctgttccctcggtaaaaaaactgtgaatcattattgtcacaaactgccaccttagtcaacaattctgacttctcttctaactgttttgacttctcttgattgatacatggcttcaagaagctttgtacggtatcttggtccagagtgttagaaaactgtttactttcaactatagggcaaacctcctctctcttgcctctgtcaatatggtcataatttctttttggctccaaacttgcagtttcttcatcacttccagaggacttttcctttactactgaagatgccaccacatctgaagatatcttgaacatggtttcatcaaatgaatttgtcttttttggaccaagtagatctttgccagagaatttcacatgtctgtccgaggttgcctcttgatcattataatagctttcttgagcaccatctccaatactactgccacttgacgtcttttcagaaacatgtttgaagcggttcttaagaatgccatgaaaaggagatactgctttttcttgctttccaactgagtcgcagtttttaacttgttgcttcttttctaccgataagcaatttatacctgatttctttctatcgatagaaggatcaacctcatgcagtggaagcattttattaccgattgtacctttcagttttctggaactgtttactgcactttgcaccatgcgctcgtaaacatcatcctgagatagacaagattaataaaattatgaatgttatattataataaaataagaataagctgactaaccattaggatatgcaaaatatgaagataaatataataacacctcttgtagcctgtagcttttatatctttctcctttcttttcttttttatggatgtcatgttgtagtttttataagaaaataaacaaaattacaacaacagtttcatgtataatgatgccaaaatgtatgtttatgaaacagacactgtagaaaatcagcatttcatatcctttcaacaattccaatcagaaatagtgaaaggatttcaattgtctatgactgttgctacattacaatttacaataacttgatgtccaaagatgaatgtccctaaaactttactcagaccattggtttttcagtttttttataattcttgtccctcatcaaaaagctttttgtaaaagattgaggcaacttcgttcgtgcctatatcttgtgtctacataagataaaacggcaaagacgttttcaaatggaatttatggtcaagtaaaagtagatttaatacaaaagaacaatttcacgatggaaagtttcagggaactatacaaactatatttccagcgttaattataaaatcacgatccaaacttctggataaacaaactctttgattattaagtgaaatttttttaattttctataattaggaaaagactttagtgacatttgaataacagtttaattggggttttaagtaccccatcattcatttaaaaacaaatcaaattgaaatacattaagatcaactacatgtagaagtttataaaattgaaacaattgaattaagaacgaaattatatcattattttatcatgataagaaatttcagaaacgcttaaaacaaaattcttaaacttggtcattttagtatcaattttcagaaaagggaaacatagaaatttatatatgtatatatcataaatgcatagatcatatatttaagtagccataaaataaacttaggtactaagaaaaacaattgaaatttttgtaatcaatacatcccagaaacgctcgtagttaataaatataaggttatttgagcttatatattctggtacaaatatactactatttttaaatctttacgagtgaataactgaatatacatgaaataaccatatatcaagctagatgaatgtataattatatatatgaatatcagcatgaagaatgcatgagagcttcaattcaaaatcttatttattgataatttttacgtgttgatagaaagaacaaatccctaatattgattttacttaacaaacagaacgctaaacaagcttgtagaatttggcacgaatatttttttttttaaaatttcgttgtaactgaaagctggggcgtaaaataattatatgctattaagatattaaaaatccggtaagttgcaattacactttatgataaaataaacaaaattgtaaagacaaccctttttgtaacaaaatttctaccttctacaattccactttgcgaatcttctgtttgaaatcacaagagattacttctaaaatatcatatccaaagtgtaattctataacaacatatatattcttatcattgtttatacgaagaagaagctaacgaaaacacatgcatggatatagaaaatagtattaggacaaacaactattacagattctgaaattaaacgatatcaccatgaggttaaaattattattgtaaaatatttatacgataaatatcttacttagttcgttcttttagaaaggcaatttaaaatgcaaattaattaaattaaattttaaaaattagtgggatattggattctattaaaaggggaggggatggacaatggcaaatgcatgaatcatgatgcttaaataatttttttacataaatttgagactgctatgtaattgttcactgttgaaactagaaatgcacatatcacatgatacacctctgtagaaatttacgtggtccagataaccccattcgaaacctgagatttctttagaatctgaatgccgaaaaaatccaatatattttaatcttgtaaaagaaatggtaggtaggaaaaatatagaatcggagttcgagaattatttttggaaaataaagtatttactaagactagtctagaaacgttatttcaaacaatctagacactataaaaagatgccattactgatacagtaaggacagtcaagttataaatttcacttcttaggatagagttggctgcaagatcatatcatccttatatcatcatcgagtaaccttcatggctagccaagttaaatatttgactactttacttccactttcaaatttcggccagcgtaaccacaaactgacgttggtttcggttttctattgcttctatatacacctcctaggttgggttcaaatagacactcacatcgattagatcgtatctcaaaattgtctgcacatgtccaaaacatgagtcgctaacttatgttgaccgatacatccaagtcattctacccaaaaacgaacactttcacaatataaaatcaggtgtctcacacaacgacagaaagtccaaaaccattatacgtaccatacatcaccaccccctacttcactaatacgccataaaatatgcccatgcgataatgatctatatcaacccaagccagagtattcttttttgacgatacatgcccatctggaaattgcatatgcgaacattcatcaatccaaatcactaaatatacacttctgacagacccaataaatgatctatcaaattctggacctccacttgcagatctcccacaagccaaaatacatccagctgtaagctgcgtataaaacctctctacgtccgaaaaactggccacaagagatatatgagaatctgttgatctacccatagcacatacgataatccccccccaaattattagttaatagtgacggggctagagaaacccctcatcattagactcagctctctcttctacctcgtaacccatgagtggccccttctagctagggtacttgtactgattatacacacaacacacactacagctggagcaacattcttacaggcttcactaccttctgaatcccttccgcgcacgaaggcactggtcatagttttccttttttcgtaactctcctttcccaacttttacttgtcgcgtatttcgctcaagtactcaacaaaaaaaaaaaaaaacacccactttcgtccaaaaatatgtgaagctctctctctaatcagctttttcagcagtaattttatgcagaaaaagcaagacatagagtaaggaaagctataatcccatggcataagaaactacatcaacccaaaatctacattctacagtgtcgggtaatattttatgcgcaaattccatgaatttgtatacttatcagccaggaattagctgcaaatcgcggaaacacacagcaaataacggaagattaacttatattttatgagacgcagaccacataccttgttcccagttggtccgttgttgaagacattcttttttttcttcttcttcttgctcgcaaccgtctgcttctcattgctcacgaaccacacactactatcgccgtgcttctccaccttgcttttcttcttcttcaccttcttcaactttttcttgttcctattcttcatcgtactcttcttgttcttaattaccgaagcaacgggagtagcaacagcagcagaaggagcaggagtggcggcactagttgaatctccacctgaatagccataatcggatttctcctcatcttcttcctcaacctgaatcgctttccttttgccggcttcgatcggtggcgccaccgtaagaatctccgcgatcgagcgcttcttcggcgccttaggtatgggcttgcaattaaccgtcgaccttctcatctgccgccgttcctccctgacggcctgcgcgaggcaaccgtctatgtgtgcgtttactgccgtcaccgtggcggcgttgaaatctcgacaaacaggacacaccatctccatcttctcctccgaggaatctccttggtccgatttcgccgactcgccgcctccgcgcgtggatctcagcgcctccagccgccgagaaagccactcgaacttcgtgacggtaatcgaaacatcgtccgcctcgccctcgcggaacggccagaacttcaacaccctctcgatttgcggcggcggctgaggctgcggctgtggctgtggcggatgtggctgctcctccaccttgaaaatctcggctatggaacgcttcttcggcggcttcgactttgacgacgaagatttcaaattcataatcctcatgtggcgacgctcctctctcatcgtctgcgcgaggcatccgtcgatgtgcgcgttcaccgccgtgagcgtcgcggcgttgaattcgcggcacaccggacaaaccatctccagtttctcgtcttcgttgttgttattgttgttcgccgccgaggagtcggaaggaggcgcggatttctcggattccatagattctgcagattcatcttcgctgcaatctctgtcgccgtcgtcgtcatcggttctagatacttccgcagcagaaggcggaatctccggattttgagggcggcggtcgttggaatcgccggatctagggcacaggttcatcggcggaagccacgactgaacctcgtcacgtgatacgtcacgtgaggaggtggatgcgaacggccagcacttgaaaacgtcgatggacctcatcttggatgtgtagtccctgcaacagcaacaccgaatcaaaacctataaagcgcgcttctatatattagtaaaaccaaatccacaaacaatagataatagaaaaaatagatataccttatggagaagccatcaaacgtagccgccatgataagtgattacaagaagggagagactacgaagaagaagaaaaagaagaagaagaagactgagaaaagaggaacatcgatgattatgattagatgagagagagagtaatcaacgttttgcgctctcacaccagaagagaagaaggaggaggaataggagagagtgttgtgtgtagctgtctgcttgcttttccctaatttatgactgaaagggacgtatgagagagagagagagagagacgacagatacagaagaaacgaaggtgagagaatattttattaattattaattaaactcgcattaattatttaattaacactcatgttttattataatgttaatgttggtgcttgttactgtaattgattttcgctgattaattattttattattgctaatcaactcttgcgctttattcttttctttccatgcatattattttcatcttaaaaaaaaaaaaaatgaagttattgcgaattgtgtgtgttgccttgctggtggctgctccgccgaaggttaagcgtgtatgtattaaaatgatagtatagttaaagggggcgtataatgtatattgtatggtagtatttgttaaatgctaatgttagatttgtagtatgatctatgctgttatatgcccacgctcgtctacttgtatgaaacaaagattctgctgtaagaccacaaataatccaccatacgcgatcacccaccaatccacgcgctttctaccattataatatcacttcttttttaaaaaaatatattattataaatagtttccaaattacttacattgttttcttttttttatacaattaacgctttatttttcatggttttgagttccacttaaataataagaaataaatatatataattaagaactaaaggataaatcaagtgacattatacattaaataataagtactaccttaggagaaactcaaatttcaattactacttaatctttatggttcttcctttttttaaaaagatgtgtacagataggagaaataacaaaagaaattttttttcttcttttcttctaatactttcatttttttgtgttctaaatttagatttacttttgcttcatatttcatggggaagagattataaagaaataatgagaaagagatgtgacaacagctagagtagcaaaattaaatataattttctttctttctttcttttaatattttcatttcttgagttttatgaaattatattcactttcactttgtacttgctgacgaataaatgacaaagaaacggtaagaaagaggtgtgatataggagagaacaataagagtcaatattcttttaatactttcatttctagagttttactattaatttagagtcactttttctcagtgtttggcaagaaaatggcaaaagaaacaacgagaaagaggcctaaaaatgaaatataacaacaaaagtcaatttaatatttatgaaatatgctgaaaagaaattaaaataaagtggcgggcctcaatcacatttctttccgagtaaaaaagatgaaaaatgacaaagaaacacataataattttacctagaattaattttgcatgacgacataatcttttttgtataataatttgctgccgatcgacatcttgcattgaccatgaacttataatttgtgtgtctcttattttaatccaattctcatcaacttacaatacannnnnnnnnnnnnnnnnnnnnnnnnnnnnnnnnnnnnnnnnnnnnnnnnnnnnnnnnnnnnnnnnnnnnnnnnnnnnnnnnnnnnnnnnnnnnnnnnnnnnnnnnnnnnnnnnnnnnnnnnnnnnnnnnnnnnnnnnnnnnnnnnnnnnnnnnnnncttcctattttgcatgacgacataatcttttttgtataataatttgctgccgatcgacatcttgcattgaccatgaacttataatttgtgtgtctcttattttaatccaattctcatcaacttacaatacatatgtctcttgttttaattcaattttcataattctctgaaaaacacaaatcccaacctctctaaaacaaaacacactcaccaccctcattaattattcaactatttgaaactattttatcacgagaaatagagtgaattttctttctttctttttggtgctataaaacatccttcttagagctgaaaaatagggaataaaaaaaaattatgtatctgaaaaataggaagaaaaacaagtaacaaattattctcattcaaatgttgaaagtttctatccttcctcgtttaattttttctcatccaaacaaaaggtgaaannnnnnnnnnnnnnnnnnnnnnnnnnnnnnnnnnnnnnnnnnnnnnnnnnnnnnnnnnnnnnnnnnnnnnnnnnnnnnnnnnnnnnnnnnnnnnnnnnnnnnnnnnnnnnnnnnnnnnnnnnnnnnnnnnnnnnnnnnnnnnnnnnnnnnnnnnnnnnnnnnnnnnnnnnnnnnnnnnnnnnnnnnnnnnnnnnnnnnnnnnnnnnnnnnnnnnnnnnnnnnnnnnnnnnnnnnnnnnnnnnnnnnnnnnnnnnnnnnnnnnnnnnnnnnnnnnnnnnnnnnnnnnnnnnnnnnnnnnnnnnnnnnnnnnnnnnnnnnnnnnnnnnnnnnnnnnnnnnnnnnnnnnnnnnnnnnnnnnnnnnnnnnnnnnnnnnnnnnnnnnnnnnnnnnnnnnnnnnnnnnnnnnnnnnnnnnnnnnnnnnnnnnnnnnnnnnnnnnnnnnnnnnnnnnnnnnnnnnnnnnnnnnnnnnnnnnnnnnnnnnnnnnnnnnnnnnnnnnnnnnnnnnnnnnnnnnnnnnnnnnnnnnnnnnnnnnnnnnnnnnnnnnnnnnnnnnnnnnnnnnnnnnnnnnnnnnnnnnnnnnnnnnnnnnnnnnnnnnnnnnnnnnnnnnnnnnnnnnnnnnnnnnnnnnnnnnnnnnnnnnnnnnnnnnnnnnnnnnnnnnnnnnnnnnnnnnnnnnnnnnnnnnnnnnnnnnnnnnnnnnnnnnnnnnnnnnnnnnnnnnnnnnnnnnnnnnnnnnnnnnnnnnnnnnnnnnnnnnnnnnnnnnnnnnnnnnnnnnnnnnnnnnnnnnnnnnnnnnnnnnnnnnnnnnnnnnnnnnnnnnnnnnnnnnnnnnnnnnnnnnnnnnnnnnnnnnnnnnnnnnnnnnnnnnnnnnnnnnnnnnnnnnnnnnnnnnnnnnnnnnnnnnnnnnnnnnnnnnnnnnnnnnnnnnnnnnnnnnnnnnnnnnnnnnnnnnnnnnnnnnnnnnnnnnnnnnnnnnnnnnnnnnnnnnnnnnnnnnnnnnnnnnnnnnnnnnnnnnnnnnnnnnnnnnnnnnnnnnnnnnnnnnnnnnnnnnnnnnnnnnnnnnnnnnnnnnnnnnnnnnnnnnnnnnnnnnnnnnnnnnnnnnnnnnnnnnnnnnnnnnnnnnnnnnnnnnnnnnnnnnnnnnnnnnnnnnnnnnnnnnnnnnnnnnnnnnnnnnnnnnnnnnnnnnnnnnnnnnnnnnnnnnnnnnnnnnnnnnnnnnnnnnnnnnnnnnnnnnnnnnnnnnnnnnnnnnnnnnnnnnnnnnnnnnnnnnnnnnnnnnnnnnnnnnnnnnnnnnnnnnnnnnnnnnnnnnnnnnnnnnnnnnnnnnnnnnnnnnnnnnnnnnnnnnnnnnnnnnnnnnnnnnnnnnnnnnnnnnnnnnnnnnnnnnnnnnnnnnnnnnnnnnnnnnnnnnnnnnnnnnnnnnnnnnnnnnnnnnnnnnnnnnnnnnnnnnnnnnnnnnnnnnnnnnnnnnnnnnnnnnnnnnnnnnnnnnnnnnnnnnnnnnnnnnnnnnnnnnnnnnnnnnnnnnnnnnnnnnnnnnnnnnnnnnnnnnnnnnnnnnnnnnnnnnnnnnnnnnnnnnnnnnnnnnnnnnnnnnnnnnnnnnnnnnnnnnnnnnnnnnnnnnnnnnnnnnnnnnnnnnnnnnnnnnnnnnnnnnnnnnnnnnnnnnnnnnnnnnnnnnnnnnnnnnnnnnnnnnnnnnnnnnnnnnnnnnnnnnnnnnnnnnnnnnnnnnnnnnnnnnnnnnnnnnnnnnnnnnnnnnnnnnnnnnnnnnnnnnnnnnnnnnnnnnnnnnnnnnnnnnnnnnnnnnnnnnnnnnnnnnnnnnnnnnnnnnnnnnnnnnnnnnnnnnnnnnnnnnnnnnnnnnnnnnnnnnnnnnnnnnnnnnnnnnnnnnnnnnnnnnnnnnnnnnnnnnnnnnnnnnnnnnnnnnnnnnnnnnnnnnnnnnnnnnnnnnnnnnnnnnnnnnnnnnnnnnnnnnnnnnnnnnnnnnnnnnnnnnnnnnnnnnnnnnnnnnnnnnnnnnnnnnnnnnnnnnnnnnnnnnnnnnnnnnnnnnnnnnnnnnnnnnnnnnnnnnnnnnnnnnnnnnngtagaaaaataatatcttaaaatattctcattcaacatgagcctttgatttacaatacagaactagacttaaactgaaaacaaggaattatttgattcgtttataattttttaaataagttttaattttaaattaagaattaatctcatagttgtcataaaaaatcaaaaacttatatagatatttgagattccattagagaaccaaattttttaattacaatgactaaaaaacagttcaaggttagaaaataagaaataaaataaaaaagtttgttttttttttttaattttaaaaataattaataaaaattaccaccgtatcataaaaaaatttataaatgatcaattttgtctttgtactttatattctccatgtaaatatatcgacaatttagtcttatagtgaagtttcatctgttttcgttaatgttgagtgtcaacgtgatacatccttgatgacgtgacaaacccacgtttgtaggagatgttccacatcagtcacaatgttttggactaaaatgttagtgatttatttgttttaaaatttataaaggtaatgactattttaagtacatgagactcttctttctaatttcatgataatattttcttctagatcaacaaaatggtccccaacaaatataacttaataataaaatggttcgtgacaatattgtgaatttaaagacgcgcatgtatcatagtaaaaaaacatacataagatcagtctccagagtcccaataacattcttcaccatccatgtacatactccaacaccctttcattatttcgaacaagtcaacctttgtggtgcaacataaggttaatctttttagacattcgataaaaggaaacacacaaaataaagtcaaaagaagaagaaaatagagcatctttgtatcaataataaaatttattccctttcatacccaaaacagagcatcattgtttcagttcatcaaagcatcatcaacaaaccctaaaccctaacacatgtttaatcccttgtttgtctacaataatgaaaaaataggaagaaatctaataaaaattacagccacatggagaaatgttacaaaaacagaggttatcaataaagtccagccaaacaaaaaaaacatcttaccttacgaagttgcctttcatctttaacgcacaagaagaaatcaaacaaaaatggcaaccaccaaccaaacaccaccatttgtcgccaagtcgtcataggcatctatgatgcaaaggcaataaagagcatatcaaacttagcactcacaattcaacctctttcttacaaaatgtaaaaaggaagaggataaatggtgaattaataaaaggtaaaaacatacacatactccaattgacaatttggtccatacatacttggtccaacacatggctttcacttccaccacgtggatttgtcacgtcgtctttcatgtgccacattgccaaaaatgttaacaaaaatgaaggacatttgacagtaggactaaattgtcgatacatttaaataattgtagactaaattgattattttcatagtacaaaaactaaattgacagttagtgtaaagtacaaagaccaaattggtcacttaccctaaaaaaaagtagttatacatgaattactcataattttgaacactctatcaacgcctctaatttctcttcatctttatctttttatgacatcataaatcttatcatacatatatttgtttcctctccctagatattgggtagcatattattattaggtgtctagaaaacattttccttaaaaaaatttattttcgaaaagctataaaaactatttttacttatcaaaaatagttatgaaacaagaaagtccacatctatgggtaaatgaccaatttggtccctctgaaagatgcatccgatgataatttgatccttgaaatatgaaataaccaatttagtccacaaatgtgcaaatgttgtaacaagttggtccgaccatcaagtctttattgtttccattaacctttgtgcacacatgacacgaatgtaactaacgtggcacctccacaaggtcaagggacgagacacgtcttatgcacaccgttttggacgaaaatgtcacctagggcttggtgggggcaaggttggcaatgacctcgtcgctagcctcgagtatctctgacgacaattaaaaggcaacgttggagaagacattgatgctagcttggtgcttgagggaatcgacctcgacagagggccaggtttcaacgtcgaggatcttgttctcaatgtcgatggcagagtggatcatcttggtgtgctcgttgtgcatggttgcaagtatagtgacaaggtaagtgttgctaacgctatggaggacgattgtgagggccatgaagatcttagtgtacttgcggccaagcttctctagcgtgacatcaacgctgcgacaggtcataatgacaatgcagccaacctcgttgcattaaagacattgacagagttctgttggtctgtgacagtgatgtcgatgacgtaagtgtagttcacaaggtggactaatttgtcactaaatgtttgacttatggaggtgtgctttgaggaatcaaacattaattgtcaatttggtccaaaataagatgctttgaaaagttaaatattatgtgataatttagtccaaaataatatgtatctgacgtgtcttaacacttgatcttatgaaggtgccatgcgtacacgaggattaacaaaaacataaaagacctaatgactgaatcaaattatcataatatttatacatttataaattaaattagttatttctatctttttatctcttattactattttttttctaacgttgtagatactattcttgagaactgaaaagacgtggaatggaagtatcgtgaagcgcgtgaaagggacgagttgtgtggtgtcgtgtgtggcgatgcttagaatatgaggcgcccccactaacacacacacacacacacagtcacacagtttcttgcagcgcgcatcattttgactttaagaccttttgtttgtttgaactttaaagtaacgtacaccgcaaattaccaacttctccaacacagggtctttatctttagcatgtttagaccaaaccataggatgcagccaaacactctcagatttaatttaggtagatagagtttttattttttttttccaagataaatatgttagataaaattatagttgggtgatagtaaatataactttaaatatcaattataatgtgatctaaaagtaaactattattattacataaaagttataatttataaaccatattgaatccaaaatatttcatgatttgtgaacactcaatcatgcataaattttaagaattaatagtataaagaacttctgtattagtattcaacggcaataaattaacatatatgataaattgttaattttaataagtatcttaaaaagttatatttataataattttctaattgattgatgatgtaatttttttataatattataagtattatttgtaggaagtaattttattcgagttaaataaaatttaataattatttttgaatatttaatttaattacaattgcataactaaaatttaaatttaattttttaattaaactaaaataattctgtccattaattcacgtgttaaataatattaaatttaatatttagattttatttgagagttttataattatgtattgataaagttaaatattattaatcatttaactttatcacatatcactgttattataaattttaaaataattatgataaaaagtaggaactattattttacatgataatttataaatttttatttgaatataattactgtgaagaatatagttggggcgtggcaatctggcataatgatacacgaagtgactgaaaacatcatagatgcatgcggtcaaagaaaacgacaagaaggtaggacccacccactaatgataatggtattcgtgtcgtgtagtgcacagattattctctttctctctaattctaatctaatctcactttggtagtttggtttcgtttgcatcatgcctagcttccaattccaacacccaaatgcaattttcagttcttacctctctgcttccctctacactcccgaatcctcctcactcatctggtatgtgcctataatcattataatatataatttcatcaaattagtctttattctagtttggaaagtcttccatgcattttctattttatatatttctatttctttagcatatataacttactgatatcatgattcatgatatatattttttgttactcattttattatgatacctgccccaatccttaatcaagggatcatttcagtaaagaaaatgaaatataatttaatattcggctggagtatggacttggtgataaaaatatatatggacttgctgttttagctcagcactttttctggaagagcttaaatttatatatattctttttcaatttttgtttgaggagtaggaagtaacacagtggtttgctgattttcattcccaaaatgagcaaagcaggtgtcaggtgtttgggttgttgaaatttgttgttatttttgaaatttcaatcatattttggatattttttcagttgatttttttttttcctttctcttccaatgatgttttttttttcctgtaacagattgaggatcagattcaagtgcatcttattgttgaaatcatttcctgtttgctgatcctggctgatgaagaagttggaggagattgatattcaacctttgaaggttgttgaaacagaatctacagtccaagcaggcaagcaccctccaagagaattgaaggtccccaagtcactgttaattgaaacctccaaaaccaagtccgaggatcaaacaactgcaacacaatatacagcaagaaggtaacaagaaattccaactagacctccatcatgagtatggaatattttactgaaattgttttatgcattcaaatgggggatattagaggagtgttagcaatacactctctattccctatacgatggttaatttatggttaattaatgaaaactacaaaattatgattgaggcagatgagcaaagttttgtgagttttgaattaattttaatccataataaagagtatattcaaaagagtctgttactgacagacatttctcactataaatataagtcacaaatgaaatgcatgagattaagtttgcttcagacaggaacaagaaattgaaaaatgattggcatttatttattgaggcaatgctagattttttctgaagctcttcggggatcataattcataagtaaaccatgttgtcattccaaccagaaagaaaagaatcaaaagatgaaggagatggttgctgtttgctttgataattgaatgaacaattaatgcaagagaggcattgagtaggatagcaatcatggaagagctaccctttaggtttgtgtgaaagcagaaggatttagatacaacttgagtgttgttcaccatttatttaatgttccatccaggatgtacaatgacaaccagcaagggaacagttttaaaatttacataaataaaaacataagaaagggcttattatctcttatgtaaattaccttgcaaaatgtaagccttactactgattgttggactgaacgtggatgcaaaatctgaatttaattatatgtgcatcatttccccctttatagataaagaagtacacagtccacaagaggattatgatgaatttgttacctactgagtattgacaaaaggagggggtgactcttaagttaatttgactatagaaatatagtgagattaaaaatttgactaattgtacaaagatgaaaagcaaatcacttgtgtctggggtgttcaaataaggtggaattccaccttgatgttagagtttgcttttaaattacaaacaacattttagagacttgaagatactaatgagaactatttgtttgagttttaggtgtaaaaggatcttccagagatctagttattgatgattgatgacattaaatccatggatatagcaaaatgaaacgaaagcatgagaactattaattggggaaacttaattagttacttaatgctatttgtttataccaagtttttgtgggaccaaagatataaaataaactttgttgagtttctttaatttgctaacggtatggttttgaactgcaaaagcattgacttccaattaaagtgaaagaaacattaaccttgttgtttgagcattatttcttttattgtgaggtagtagctcaaaaactgaatgcttatgagttttagttttgttaactccttggcaagtgtaccaattcgtctgagtagtagtaaaacggtaagaccgagtgtcagaatccacatagactttaactgtactcagagtttgtatatatctaattttaagttaataaatgactaaactatatacttgtcaagtgataatgcagaaatgcaaaattcaaccataaataaagataacaaggtagagcacacgcaagagacataaaaacaaacacttggaggtgtaaactgtcgtttggtgcagatttttgtggacgtgtttggtgttcgacctaccgaaactactcatgatgtaatgttagagatttttcaccatttaacgttattccgactattacctttatcctctaaattaccctaaccatgtttcctcatgtaaaatagcctaaattacctaattttactcctaatcccttaagaactacatcaaataatttgttttaagaataaagatgcataattaaggctaaataacaccattttatccctaaacatggattacctagaagttccttcaagttcttagggtgcaaacatttcccaatgattaaaaccctataacatacatgtgaatgggtgatcaaatcataaacaagacaataaactcacaaaagaagcaataatattaaaatagcataaaatggttagtaaagattatcacatcaagagtgtttggttgcctagcccccaacaatgggtgatttagcctctcatagtcatgagagactcacaaatacaaaatgaagcaaaggaaatagaagaagaagaaggactccaagtaagtgggttttcgttccctattgtgccttactatttgtcccttaatagtacagtgctcctcctttttattcttcaaaatgctgcacattcgtgtttttcgaaaatgaatgtgcgctaaacctgcatgtgcgcgctgagcacacatgcaaagtccaactgacttaagtgaccaagcgctaagcctccaattgcgcacttaggactcatgcacgatattggcttctcgcgctgagcgtgcactggcatgttgagcgcgatgctcaaattcttcatacatcttccattcttgtgttgatgtgtccaaaaactctacaaaatagaacaaaacattgtaaaattactaactttagcattcttaagataaaaactcaaaagaatctaaattcttatctttttaagtcaaaagaagcatcaaaagagaagaagttagataattgctattttatttaagtgcacaaactaagtatgcataacaattatcaagttcatcatgctaaggattatggagccttcaaggaagacattcatttatatatatatattggagaacaaaaatgaaaacgaaacgaagagaggaatcatctgtaagttggaatttattaattggtcgaagataaactcttacaaatatcttgtacttgttatgatagcaagggatgttcttgtcccaatttccgtgcagtggctgaggtgatcctgtcaactttttgcatgagaaaacctctgtaggtgcatgtttacagaaaatcattgagtctaattaataagggtgtaagcactcatttgtgcttaaaagttaaaactggtttttgtctatattactaccaaatgataggtaaggagagacaaggtggtagttgaaactcgtcatggtaatattataacactgtttaacactgttagttcattcttgaacagcaccaatatatataagaaataagacaggtggctttctggatcaggaaatctgatcacgctaattactcaataaacaaattgtatgttcattcacatttgtgcattatgtgttactcgatgcactaattgtaatcctgattatttagcttttataggttgaaggaaagaggttctaggctactactagtttgatgagaacagctaattgaatgagtcatgagtggttgtgcttgccggttatgatataaattgttggcatctaaacctattagatttcagtgttagtaacatagttcatgctgttaggctgtgttgctgctgcctttaattacactataaaggttttaaatttcctgctgcaggttctgattttaatttctgttgtgagattttatgtttgtagtagctcacttgctccttagaactactacaaagaagttgggttatcttttgataatattaatttggtttcacatcacattatgctttatggtatggtaaagtcatacttttattttttatttatacttttgtgaattaacagtaaattttccccttagaaaaagttacaatcttatatacatttaaaggaaatataaaagtaagttttttatgcaagagtaagagaaatgaatattgagttattgaccattggattttattatagatggttaagattagaatataaaactaacatcatttttttaaatggtcatgtgatattaagaaacttttcatcttaatcatcatatgactcagatttgctatatatgcaaacatattctgacagctagctgcaatctatctattagaaaaataagtcagacgcacgaaatgccattgaggtagctaatgatctactcaaactcttttactttgcttttgtagtataaaatttgaattggttacattaacttgtcatctatgttcgcctatgtcaactattggatctcaaacgaactttaaaacaatttccatcaattaatctacgcacttagtgatcaatagcttttcgttaattaatttaagttgtgttacttaagcattgtgtcaacccagatccgcattattcagaagcaagatgttgtagtttatgcgtcttttgggttattggatgtggtttccacagttagtacagatcacacacgtgatttcaaacacaataagtttctttgtaggtaaaaagtatattacgataaaaaaaaatatttttaataaaatatttaattgtcctaattattctcctgactcctctttatacttaagagttcaaataatgagtaattataaataaagttacaggaccatttttcctttatctaagttttaatcagtgacaaatatttttgagcatcttactattgacttttaacatttcaaaagaaaatgaaaataataacactttcactgtcagatttagaagtttattcaaactgattattttacgaagtctcaaatgataaggtgtctaaaaattggccatcaataaagctgaattgagaattaagaaaaattactggtgaaatactcatttacaataaaatgaacacctatctcttgaaaaaaaatagtataacttttgacaataaaaagtattatagttaaaacatctatgaaatagacaaaagagtgtaatttcatagagtaatttgaagtaataaaagatcaaaaagagtatttacaaaattacaaccccaggtaattaagagggagacaaaagtaactgtgctaagacagctcccgaaatggcactcaaataggaagttgtaagccaaaatgggcctacaaacaaagaggttccctcctttcaccgtacgtctttctctctttcactctccacaagacacttttcttacttacataaacaggaattcttcactttaatactattaagcatgtttaagatgtgggtgagcacatgataactaagaatgaagttaacaatttccatatacatacaaatgagacaccaaaaccgaagaaaagcaattagatatgtattagctagcttcgatatctgtctcaacctacacatccaattcacttctttgttaccacttaagtttgtttctgagccaagcttgtgttgttgtcaggtacacaaatggctcatgaacataatttagaaattaattataatatattaattaataatgaattttttttacagtgtaatttaatttaatccttggtttttagtatataattgaaaatcatcaacttttatagtaattatttcaaaaaacttatttgaataatgtctaactagttgataggaatagcatagagatcagtgtatcaaattaattaaatttttaatctctctcaaaagtggcattgtctttcttattactactaagttatattgatctttttcttttcatttgtgtacgtctggtgatcgctttaaggttcactgtttgattcagatcgtactaaagcagaatataaggttgtaacatgtaatggtgtcaggtgtgtgttgttgcagcggttattttacgtgcgatacttaagaatgaaggtaacactagtatgacaatgattggtgtttcagaaacgaggcaccgttaaatttgaaattgtagcacttttagttttaagttttaacagagaataataagaggggaaagctaggtaatgctaattttcacttcaaccctcattaagatgtagtagtatttactttatctttcatcttatttatatttttttaaaactaattcacctcagtttatctcacaatgagtggacgtatatatttatccttttcatttaaggcctaaatgaaagaatatcatatgatatgtagttttaactatcaaacaggattgatgtctccctctaggtctggttacaaatcaataaaatcacttcgtgatcaaattaactaacatctcattcaatttatttaaattacaaaagttcatctcatttagccttatactccttgtttggaaaagaagcaaattaaaataataatattgaacgtattgttttttgtgctgcctaatgcttattgtaaagtctagacagttaatttaaacaagaaaacaagagagagagagagagagagagagagagagattaagcctgtgttttgttatacatcaaatacctgagaagtggtattttcacaccaatgacatgaaagaaaaatagaagctactatttatagctcctgcttgagatcaaatactgataaacattaaaccaaacaggcagtaaggaaaaaaagaaagcaacaaaccttcagcaaataaaaattcaacttccattttcaagtacctgtatatatgtgaaagcgataaaattaaaatgacttcaatttttgagtttaatgaatatccactgttaacataaatgatatttaaattaatgtctgatgtattgatatatcattacttattatcatatcatcttttattcattaaaaaaagtacccaacgtattgagttttagtgtataacttctattatatagaatacatattttttttataagcatatagagaatacatattaattattttcaacataattaaatttttgaaaaacatcagttaatttttttaaaagaactcattgattgtccatgcctaactgcgagcaggaaagcaaacattatattgattcttcttaaattttgaatttatatattttcagatttcagatagtctgttaaaaattaattacgagcaggtaagcaaaaatactgtttgggtacaaattatagagaaaggtaatcccatcctggtattctggtagtcaaagttgtgctatgcttctgtgggggaataacttacagtggatcatgtttttgttaaatttttagcattcaaatgctaattttaaatttagaactttgtacagttaagagactaattaagttttatatatacaactcataaatttatttgagggggatcaagttatctgtcactcaaaccaaaaaccaataaatacttatgccttatgctcataacgaaatccattagtcctatttgcaacccaacctaagttgtaaaatgtactaggctcatggaatgcaaatatctaaaatgatttttctttttcaaagtttacaagtggaaagtttttaagggtctagttagacttcaatttatgaatatccttttcttctaaatttttgatgaaataagttaacaacgttatcaatttttgaattaatgataaaataaaaaattacattattattaatcataaactaacatatataataaaattgttaatttttataagattatttttaaagtgatattgaggtaatttttaattagtttccacgtgacagtataaaaatatttacattaacaatgtataaaaaaatcaaacccattaacaaataatttcttttttaaataaaaggttgaattatgaaaaaagaaatataaaaataggtaatgccaacggtcaaaatgctcttattatgtccactgtccattgtccataatgcttgtagacttgtttgcagtattgcagttgcagcagcatatggacacattttttacaaaccctcagaatggcactgaaccaacctagacattagataggtcaaagtatgcgaacatgcacaaaacattgcaaaagcagatcccggcttaaaggtgttcccagactactaaaaattatagtggaaacaacacagtctgttagaaactatataaaaaaaaaaatattaatgcctaaaaaagaagacaacgaaatttgattgcatgtaacaaaatgaccctttgtttgttattccttaaaaattctttcatcttttaagtgtaaacagtaaaaggatttaatttaattgattaaacagttattataaattttttgatatctatctttgattcaaatggataaaaaaaatatgttttgagtttttcctaaaagagacaaatggaaagacattggcagtttctatccatcaacatcgtcctgcattctgattcgcaaggttgtctgttatcagaatcattggcagcagcatcattactgaggaagaaactaggaagcaaaacattgccacttagctatattgcaaagacaattttcgttgttttaattttgcagcaaaaatcttcgtatttacaattatatttaaatagatggatgaaagcaagaaagataacataaggatcagtgttaaaaagtaaaactgttcaccggtccaaacaggtactcaattcccttgaggcccacacatagaataggagcaacgacatggtaccttctttactgaaaaagaacagcgtcttaacaaaatatgcctaaggttaaaataatattttaaaaagataaagcttagaaacgaactaactttttttataagcaagaactagaaagaatgtctttggacaaaattacacaatgatatgtcaacattcttttcagaatttattcaaccgcacgtcgagcgaaagttatttacaaaaaactatatatatgacgtgcaagtatatgatactgcatgatcaaaaaatttattggttcttgatggcaaggcaaatatttatctggccgtaaagcgagatgatcggctacttggatttgtgcgattacccctaaatatggcttccagattctggaagcatccaggagtcctaacctgtgtatcataacaagaaaatattacaccttaggaaacaaagaatcacacagtctggttgtaaaataagtatatcaaacaatatccacacctttgagggcattctactggtgagatggattaaaaacagtcactctagtaacattaagttggtataaaaattattaatatccatccaatgatacagaaaaagtctttgaatctgaaattcctcacattctgttaagttttagtattaaaaattactgcgaagttatatactaccataactaggtctaaaaattgataaaagaaatattcacatgaaaaagggataccttccagcccctcttttgagcaagattgtagtatatgtcttccaatctcccaattatttgcctaaatgttggccttctgtacggtttttcatcccagcattcctcaattaacctatggacaaatcaaatttcctgaatgtgaaaaacttattaatttaatttcctacttgtggtaggttttgaaactaaacattcaaatctgctgccaattaaatgtatttaaaaccctcactgttttagcccattagcataaagctttggtgaagctctaaacggtggacgctcattttcaacatatgctttaggaacttcattttctggctttgcataaaacggtggacaaccttcaatcatctagaggaacagaaaatcatggaagttcctgtcaatatttagctgggcatctctacaaataacaacccacagttggttgtcaatctgtatattctatatacaaaattgcccatcatccacaaataaaataatcatattttgaactttcagaaaatgaacattttgtcttcacataaaaaaaagtacgagaacatattggtaccacaacaaactgttgggcatggcatcttactaaaatgatcatgaatatatacatatatacaaacatttatattttttgggtcaatatgtggagaactcaaaatctctagaactctacctgtccattagatcaaccttaaaatatgccataaagcattgtatatcacaattatatataatatacatatctttaggattatctgatggacaaagcaggcagagctcacgtcacgaatgcttgagctgtccatagactcctatacgtatttacttgacaagtgaaagaggaatgctgaaggaatttgaatgccaaaagcaacataggatacacagcaacaaatgatacacctctcaatgcattccttttcctgaacttccaattttttaactaacatgaacaacagagatgtatgtatgtaggggatatgactttatgttcaggattatgtaaatgcttttaattgctcaaaatataactgaaaaagcacagaaaacataaagtaaattccctttttcttttaacaaagcaaatgcaattaacagccttttaaaagttttatgtgatgagataaacagaaattacaagggacggagagtattgaattaggaaaatcagcatgcatatagaataaattcaatgatttacctcctgtaatatcagagcaaatgaaaatacatccacttttgtgccgtattcctcgtttctatatacctctggagcaacataacgccctgttacagatttgaataaattcatcaatacaaactttgaaatcagaaccaatcacaataggattaaaataaaaccagttatacatataagagatggccatatttataaatcaattgataaattcaaattagtaaaattgagcaccagctgacaactgtctttggtagtcactgagtagacagcatttcttttttccttgcagaatatgcaacacagtgcacattacggccctcatgaaataaaagttcacaatattgcttttatgcagactgacatgattgacaacgaatattacaaggttccactaaagatgaaaacttacatgatgtatccagggctccactaaagaagaaaacttacatgatgaatccaggcttgccacgggtttgtcttctttgaccgttttagcaactttaagcaacttgctaactccaaagtctgcaactttcagatgcccagaatcatcccgcagtatatttctgttgtcttactcatgtacaatgaagaaactttaaacagttccaaccattcaataatgaattaaaaatgcatgcttctactgaaaaatccatgatacttcatacacatgctggaagaataataaaatcaacaagacaggacaggagaacataaaacatacgaaggctcaagatctctgtgtataatggcttctggtttatgttcatgcaaatagttcatacccctgcaaaatatacatatattggaattattacaaatatccaaatgaaaatttttaatataggagaaaatcttcattaattattcaacttttcaaaaaatgaaataatcaggagagcttgcttccttgcaaaccaactgaaagccagtgatgcatccataatatgaaagctcttgactgacctagcaatatcaagagcaaactttacagctgttactggtttaaatgcacctttctgcttcaagtaggcacggagatccccctaaagagatgataatccattccaaattgtcagacattacaatagtgaaaaatacaaggtatagttaaccacgttatacacacaaatagaggagatatcttcctaattatatgcacttccttattttattcaccatttcactaacataaagtgaatcccaataaacataaatggaagttctaattcagcacttatcaatactagactaaaatggttatctcttatcattacttaaaatcctacaatttagatatttataacttctagacagaacaggaacataattgtctgaccggattcagttcctctaaagtgagaaagtgagaaagtaagaatctaccaatcatcaatttgaattaaagcatttcgtatacataaccgactttatatcaattgtagataatccctcactttttcacttagagggccaaaccctgtctggcctatgcagaattgcaaataactcctgacacttcaacaattagtatcagtcccagtataacttttatcatattaagttcttaattattaattttttgtgcactccaacataatgctagatttcaagtagtcctattgaaactacgctagtcactttctttctaaagactatatccaaaacgataaatttctgaccacatattttattcagctcactattatctatgatagccattagccaactagccaatatgatttgttcataaacaccacgggcaaaataacttatcataaaaaatcttccatataaccagtgtaggaccaagactaacctggggtagatattctgtgaaaatcatcattggtgtgctttgtgttacagcacccaaaaactggactacatttggatgccttattttctcaagtaatgtaagctcatcatgaaatgcctttctgataaacagacaccaacaaacaaaatccactatgagaacaaaaattgagaactgaatatccaattgagtaattgacatgaatgaaacaacagattgcataagtagaccaacccacactttatcatcatcagtgaacaattcctccccaagtgtcttgacagcaacctgaattccacgccataatgcaatcctgaaagttccctaatattcaatataaaatatgaaacaaaaaataaatcagggtaaattgacttgagagaatatgtcaaaacaaggcaaaaggagaaatcaagttacaaaacaattgacaatatagagaaaggaaacttgaaagcttacctttgttatgcaaacactattagtaaaatcaagttcagaaggatcaatctcatactcaggtacttcacgagcattctgcacatgcatgggagccatctacaaaataaaaagtcctcagttgcaacttgatgtcataaacaacctatactaaaaggagtttagtatctatgcactgaaagtgtaaaaaaatccactgcagtgtaaaagcaatttaaaaaaaatacttttttaagaaacaaataggatttgtaaaaaatacttttttaagaagcaaataggatttgtaaaaaatacttttttaaacaaaaaacagaaaactaatactacttttttaagaaaaaaaaacagttagacaaacacatcaaaagagcagaaaactatttattttattcaaaaaagtgttctctctttaaataaacttaaacaaacgggccttaaaaatcatggtaagtgtgactcttaacgtatttattgtaaatcaaacaacctaccgtacacaacaatatggtattacgaattgtgattgaatgaaatataaaaagtttgtacagtgtcagtttatatactactttcgcttctaaaagcttgaactattaggcgaactggaattatatgtatgctcagacagcgtaaaaaaaattatatttccattcatggtaaatatgtttgactttttataataactacttaaaaaagtcataccaaaagtaatatctaattaatagacaacataaaaaatttcacaccaaaagtgcacatctatctattaatatctcgaaatgaataacatctttatttttagaggaaatgaataagatctaagaagaagagacataccgggggccttgcaccgtgtttctccaaaagcttgacaacttggtggttcttgtagtacatggcatcaactagaggctgttaaacaatccaatccagaaattagtgtcagcgagtgtagaataagagacagcgagaagagcgaaagagagtgaaattacggtgctgccccagcggtcttgtggatcgacgtgggcgcctcgtcggagcagcaagtcgacgacgtcggtgcggccctggcaggcggcgacgtggagcgcggtgcggccgtcaatgtcggtgaaattgacgtcactcccggcgtccaagagctccttaatcccgtccgagtcaccttcgttgacaagatacatcaaacggaccgccgggtccagcgactccgacgagtcgccgtcaccggcgcgctccggcgcgagggaggattggcggccgagcgagaagcgagggtggagcttcttggtttccattgcggcggcgagggttttcggtgcgagagagaatgtggattgaattgaattggattggattgaagaagggatgagaataagagagtgtgtgaatgaacattaatgtgtatgtaatgattttttggtttaattgataaaggatgggatcgggttctgtgtatgtgtcagagagtgctagttcaaatctttgacgtcaccgcctttcttactacacactccatcgaggaaggaacaacgtcggttttcggtaatgcctctctagctaacctaactaagtttttcttttttggacaactattttttctaagagtataatttaagataaaagcttagatggttaagttgactttcttacagattttttttctgatatttttccaatgttgactttctaattaatttttttaggagattctaattaaattaattgcaacgttgatgactttttttaaggatgaacgttgttaaaactgaaccttcaccgtagaacacggtggatatataataaaaaatgagaaaataattatacatattataaaatattttatacaattattaaattataattgattatctataataatttttttgaattatactaattgatcttactaaatactcataaatggctagtgacacttaaaagctctacatccttttataagaatataatattacagttatatgataataaaatttaaggattgatttgataagatgaaagagaataaaataaaagataatttgaaaataaatatttaaattaaaataatgtaatgaaggtataatacttatttatatttttgaaattttttcttcacttctcaccaattttttcacaatcaaactcattgtttatttttattcactaaatatttttttgaatatcagttgaattgaaaatgattatttaaaaaattattgaattattcttataaattattgaatttttcatagtgttgtatttttctttcttttcatatattacacatagctttaattattggttggatccatttaataactctatatgaattatcaatttttcatccctttaatcttatttttagggtgatgtgaatagatatattttttataccttttatgactttctttggtataatttgggtggaagagttaaagaagtgttttatatttagattttttttttaacatcgctagatttatgaatttttaaatggagagatgtatataaaaaaatgggacataaaatacactatttaaccaaattttaaaattttaaatatttaaaaacatggacccgttttctaccatcgggtcaaaacaggagctccgacaggttcgcagccatggatctacctagctgaagggttcaggttcgggaaaagagacgaagattttgagcgcggaaccattgccattgccgtggccatggctttcaaccatcttcgaaacctcaatcgcatctccatccaccgcattctccaccatccttttcagcctctccttaacgctactactaggttcttcgccgatgctgcttcttcaatgcctcaaccgcagcccaaacaacaaccttcgcctccatcatcatccttgaagcacaatgagctcgccaagttcgccgccatcgccgatacctggtctgctttcgaaacgaaagagagaatctgttcaatgaattaaaattaaattgcacatttttttttcatggggtggattgttgaagttgttgctacagtgtgtgtgtgtgtgtgtgtgtgtgagaatatggatgacatgtatttgccctttccttggtgtgaataggtgggattctgaaggcccctttaagccattgcatgtgatgaatccaaccagacttgctttcatccgttctgcactttgtcgacatttcaagtaatcctgctctttcatttagtccttgttacctccatttttgagtctggggtgtttattcttgaaactactttggtagaatgtccaatgctttgtgctatgttataatttgattcctttttctttttctttttttacatggaattagtgggtttaaaatataatctggttgtactgtgtcagattccaagccactgttatttatgcagtcttattaaaccaatagcacttagtgtttgctacacatacatggtaggaatttggtttaataccccttgaattaaatataatcgtataaggatgtgtaagaagatgactctaatgaagtatctgttaataaaaagtgttaactgaattattttttgacacaaaccaaatgaagaaacaagaagaaaaacaataggaaaaacggtattacggttgacaatgggtttatatttttattttgtctctaacggggttctattcaaataataattagatttcacccttgtctcaggaaggacccttatagtgctaaaccccttgaaggacttaaaattgttgatgtaggttgtggaggtggaattctttctgaggtatatcttttcttcttttttcctgtgatgtttggaaaagaccttttcctttttatcttctggcctatgataaacctatagtttggtataataagttcagagatgactatatttgttgactatattacttgttatcgtaatcctcatgcgaatctgtagcattatgatggattcggaggtgactatatttgttaggttgaatacttgaattgtggaaatctgaattatttctttggtgcatattgtcctccctctcacttatagagtattaagtttgttattgtttttttattgcaaatttgtgctcttttttgttgttattttataatttatagcaatgcttctctttttgttcttcagccactagctcgattgggagctactgtgatgggtgttgatgctgtagagaagaatatcaagattgctcaacttcatgctgtatgcttattctatatttgaatatttgaaatttgtcagtcttgtcctacaaattgattagattgctgtattctgtatattggaggaagcagttgccaacattagtaaattaaatcttcactatttgccggacaacttataatctcctgtcaacagggtttggatccagcaacttcatctattgagttctgttgcacgacagctggtacatttacaaatgttgatgcattcttttacacttttgttttacatccatttttgacgtgcatgctttaagtctgttaacatttggacactactgctgaaatgccctacttatccaaatgaatgctaatacagtttagttcacaatcttgataagaagcacaagtctgactgtcataatttcctttatctaattttctgagtggtttccatggattcagacctttgctggatagtttagagtttcaaaagttacgagatcatgatgcattggcataaaaaacttcaatattttcacttcctgttggcttgtgatttcttgtttttcttacagcttgtagttaataaccattttatgttatttatcttaacttagagtcttagaatgtatctttggctgtagaaaagtcaattttttttgctatgatcttatgtcttctcactagggtcttacattgaagaaagtttttactctatcccttgatgtttctcattatacaaggtatcatacttggacatgctaaatcgctcaagtgggtgaataagttttaacctaaaagagttgttacattacatatacttaacacttcgttcatcctctctatagttggaagaattatagttttcattggcgatgtccatccaatttctttgctaggaattaggtagcatgtttgtaaaaaattgaacgctcttggtacatcagtacatgcatgatggcttcaataatcattgtaaaagtaaaagttgcttgcattcatctagttcgtttcgaattgtccttatgtttttgggtattatgcactggattttacaactcactaacaatttttaaattgactgatcagagaagctagttgaagaaggaagaacgtttgacgcagttatggccttggaggtactttctctttcgtgccccttacctctttctggttgtgtgcttgcagattggagtgcataaatgggtgttgggatacaaaaaaaaaaaaaaaagatatgacataacatgtagcgtaaaatctttgataatagtacagtactcagtggagttgaaggacacattttgccttgcattggttcatttgctttgaatttttttgcaggtgattgagcacgtggcagatcctgcagagttctgcaaatctctgtcagcactaacagttccagatggagccactgtgatatccacaatcaatcgatccatgagagcctacgcaactgccattgttgctgcagaatacattctccactgggtattcattcttctcaactcaactccattcaacacttattttttccatcgtacattcaatcgacacattatacatatattgaactccacagcttccgagaggcacacatcaatggtccagttttctcactccagaggaacttgtcctcatcctccaacgtgccggtatcaatgtacatacgcaaaacgcattcataatttcaattgttagggattaatcatcgcattcacgtgacactttattctggttgcattgcacacacaggtggaggagatggccggattcgtctataacccggtgaaaggacagtggtctttatcagacgatatcaacgtaaatttcattgtgttcggtaccaaataaaacaacaccgaatagcatagatagataaataagatccgtgttactgttattactataattattattagtattgaatattgaaatttgttttgaatgctgaataataaacattaaagttataaccgaaagaaataaaggttaagtgtggaatcagggagaggaggggcaaagtttcctgagggtgatgattgagttaatggttgaccgtgccatatctgaaactccggtactggacatgagaatcaaggaaccaggggtgagcaaaatgggaacggacagggaaatggagaggggagtgaagtgcatgacgcagtcagattcaaaggagaggatggcgatgccgtcgtcgaagcagagaaggtccaagaatacatacttgcctttatatccctatgtgtgattttttattctggactcttaatgaagataagaaggtccaagaatacattacttgcctttatatccctatgtgtgattttttattctggactcttaatgaagataagccaaagctttagctataccaagacaaattttcttccttgttggccagtctagttttgttgtgtttgggtccctccctgtatttgattgggagaaggacaatcagttagttggttatatcaaatgtttgattcaaatggtaagtatggctaaagtttactcatcatgaagctttccaaaaagaatgcgagatagacaattgttttccatgtactcatatatcactatatcagtattagctggtttccctccacacaacatccataaagcttaacaagattgggatgttgaagtccagatatcagtcccatctcattcacaaactcacgatttccttgtttagattttgaagaaagctgctttactgctatcattgtaccatctgatagtaggccctgcatcttgaacaaggtgtatttttttttcttgcattagaattacacagttacacatattcaaactactgaagtgctgattggtctaacaaatctccattacactttaaccatcatgtacgtggataatttttctctttcattaacccacgaaggttatatatgcttgctaacgagtacaaaatacattacagaaattatgattaaattgtaagcgttaaattagaattgaatggagatatagagaccatgaagtgtgtcttctatttcaaatccagtaacaaacaaattaaccataagatggaatagctaaccaagaatggaagatcaaaataccttgtatacacaaccaaagccaccttcgccaactttattcactgcgtcaaattttttggttgcggctttgatttgtcttagtgtaaataatcccgtctgcagatctttgccctgagctctgaaaataaaaaaaacaaaatattggaaatttggattcaacaagaaagttaataactttctgtacaatatctgccacatggttcatttcatttctatctagcatataaatatatagggcaggcaagtatactctcgtatgttctcttaataagccttgactttgatgaaatggagaaatatcatcaattacaaatcttatatagaagtaaattgttgcacttctgttttatgacatctgaataaagtttgtagaaatatttatttaaacaaattgtggaagaagctcagtcaaatactgctggatacagaaaagatgatgtgttggaaacaaatggaaatatttgttctaactaaaagaattggaagaacttggtggcatattccataccattatacactggatctttgcctcctaaccatcccatcctcctcatgagaaccagctactatgccgatggccagtatatatgacataaataatttgaacttggcagcttccgagaggcacacatcgatggttcagttttctcactccagaagaacttgtcctcatcctacaacgcgccagtatcaatgtacgtgataaatcataaataatttgatttgcttggtattaatcgtcacattcacatgacactttcatttggttgcattgcacacgcatccgcccataaaatatgagttatgcataacacgatggtctttatcagacgatatcagcatgaatttcatcgcgttcggtagcaaatcaaacaacgccgaataacatagatagctagataagatacgtgttactgttattactacaattattaatgaaatttgtttagtgaatgctgaataatagaacattgaaattattataacagaaagaaagggttgagtgtggaatcagggagaggaggggcaaagtttcctgagggtgatagaggtgcgtttggattgagtcaatggttgaccgtgccatatctgaaactccggtgcgcgattaatttcgtgtttccaacggtagcgtgcttctccggacatgagaatcaaggaaccaggggggagcaaaacgggaacggaaagggaaccagagaggggagtgaagtgcatgacgcaggaagattctaaagagaggatggcgatgccgtcgtcgaagcggaggaggtcgacgtgggcgcagattccttcgccgggctggtagacgttggcgatcatctggtcgaagagaggttctctgtggaggaggtggagggggaagggggcctgggcctgggcctgggcctgggcttgggcttggacggagcggcgaatggagtgggccagaggggtggcccaagaagggaggtgttgtaggccgaagcgcatggcctggttgatggaagggtaggggaaccaattggcggcttggatggaggagagtatgtgagactggcggcgtggagagaggaagtgacggcacagccataggccattcacttctgagatggcctcccactcgctctcgctctcgctctcgctgtagccatcagaatcagattcttctgatgatgacgacccgaacacttgctccaacactgctttctcctcctccgccaccctcatcttcctttcactttctcttcccgcactcttcaattcatgccacgcgcaacttacctagctgcgccattcatactttataagcttaattaaaaactgataaatgaggttttatatttttttaagataaacatatatttttcagatcattagatctaaagacaattcaacccacaattttaacgctaacaaataaatataagactaactattctttataaatttagtttatcctatccttttactcttgttaaacaatgttacaagttaattaaataaactgtaaattaacttttaaatatcatgtcgattacaaagaattttcccactcttacttgtatgagatgctgcaataatggtggtatgccacctaaacctaaaaaatggaaacccttacttgtagttgctgttattacgctggaacaactcaaataacagtatactcatatcttttgtgatctattttttttatttagaaaccatttactctcaaacatcaatataataacttattttaatttcattcattcaatgcatgaagaaatggtttgttctcaaaatttgcaattgaagttacaccaccaacagctgctaatgtcacagcatttgtaccacttacacatgcacttagaccacttcctatccgacatgcaaatactcatatgcttgagtttcatttccaagttgagtatctccaagagtgccccagtcaagcttgatgagtttcatcctataccacgtatctaacgacctcaacttcctttaaaggggttcaacgtgttttagacatattttggatatattttgaaaagttaggcattaacgtgttttagatgtattttggatatatttttaaaaatttctattatgacattgacattgtggcatgctttggcagaagttttactactacttgggaacttggatattttatgattaatgaataacaattttatattctataaatgctcgatttagcttgatggtttacatgtatgttatcttattttatggatgattatattactggctgtatgttataatttattttgtgcattaatttatcagttaataatatttgttaaggattaatttgttgttactaagtatatatgttttggtgaaaaaattttagaatgaaattttacttatatctgttgtttcaaaaatcaatattaaaaaaatgtaataatttagtccaaaataacatgaaaaattattgtgcacatatgtacttgtcatgtgaatgaatgtgaatcatttagactatctcctataacgaagacgaaataattttaatgattagaccaaattatcgtaacattttacatttgtgaactaaataaatgattttcataatataaaagtaaaattatcaacaaatatatattttagggactaaattgagcatataccataccattaactagtgttcatggttaattaggtcctctacgaagattaataaatgataactactccgcgcttgttacatactgtaaaaaattgcaataacaagtttcttaaattttgtaatatttttctcggaagtctaaactcgtagacaagattatccgttattattagttaagagcgtatacgtctcttttagcttcagaattcctccaactccaaatcctccgtttttctctctgaattccaatagttgttgtgttctgaagagagaacatgtcaagcaattcagatgtagcagcaccgacggtgcatgctcgtggtcgtttggccatgctcgctgctcacctcctcccctctgaactcactgatcacgacgccctccgccctctctctctctccgctcagttgccgccgacgaacctccacggaactttgaccgtcgtcgacgacagaaccggcaagaagtaccagcttcaggtctccaaagaaggcactgtcaaagcttctgacctcaagaaggtaaatttcctcctcatccatgaaattttcaatttcgatctttgctttccaaggaatttccaattttgcaaactgggtctccaccaattctgctcctttcatctttgttgaattgtttgcaaagtggcttttttcctattcctagttgcatggtgaaatcttaggtgggatggtttgtgattatagtatgctgtttgtgcttacttaacattgagtttagtttttatgcatgctcaatgtaaatttacactatcaaccaataagaaaccatcttagcataaaagtcaacaaacttaacatacaagtagtctgtgattgactgaaagtaatatatacactatttactcttattagtttagttattgttatgttatgggttttattggatttgcagatatcgactgggaagaatgacaagggactcaagctttatgatcctggctatttgaacacggctcctgttcgatcagcaattagttatattgatggcgatgaggggattcttagatatagaggctaccctattgaggagttggcagagaaaagcactttcacggaagtgtcctatctcataagtgagtgttctgtttcactgcaaatgtgtgtatgaggcttctgtggcgcttgtgtatgagtagataaaacattttgactgaggattcacttaaacagattttatgttattgaagacacttgaattttgggcttagttctgcttcttgttaattatgtgcttcgatatgtatgtagcatgaattcttctgaaatttattaacttgcatctttttttctgttttcaagtgtatggaagtttgccttctgaaagtcagttagcagaatgggagtttgctatatctcagcattcggctgttccacaaggagttttggtgagattttatgctttatctaaactaactcttattgtgtttttatgttctccaaatcccatccgcccttttttgtttcagtcagtgatagcttttagatttgtaaaatgtgaacaacttccactaattgttttacttcttgaaatttagtatgccagtggtattttatattgttaaagaaatctagtagctcttgaagtgatcatataaaataaaatataaagattatgttgtttgtttctttcaatggagtttgggattattaatctaactaagtagtggtatcatcttacgtttgttttgtaggatatcatacaatctatgccccatgatgcacatcccatgggtgtgcttgttaatgccatgagtgctctttctgtttttcaccctgatgcaaatcccgctctcagagtaagtaacaaaaactgctgtcaagtcattttttgttaataagctgaatttcaatacaaatttgtacattgtctatgcttcgagtccaaaggactctggagtgaatgagggggcatattagagatttgagatactgagatataataaaactaatcttgggattccttttggatgctactttttcctgtgggttactacaatgtacttgtgaatgatactctttctctaattaggattcaacattgtttattgttattgctctgttatattcctttatccagatttgatcctttttcattatttttttataattaattcagggtcttgatatttatgactcaaagcaaataagagacaaacagataacacgagttattggaaaggtgtgcttatttggttctttcttctcctttcactgttctatctctgaaaacatgcaaattatttagttatttgaatgattctagccctggttttactgattgtatcttgtgggattttgtccactatcctcgcaaccctatgattatttgttatgtgtcctactgctttattgccatatcatattttcacccctttttatttactgcagataacaacaattgctgctgcagtttatcttagaatggcaggaaggccacctgtgcttccatccaaccacctttcttacacagagaacttcctatacatgctagattctttgtatgtatggtatttttgtgcttgatcgttaatttgaattaagacaaccttgcttttttatatttaactttgctttatagactaatggtagtttgagttttgctcatatataacaaatccatttttgtttttaaaaagaggtataattcaatcttaagtgatagaatggtagccacatactcgctgttttttagagttttaacttttaacccaatctccactgtgcatactttcagcggtaatcggtcatataaacccaatcctaggctaactcgtgcgctggacattatcttcatcctgcacgcagaacatgaaatgaattgttctacatctgctgtccgacaccttgcatcaaggtagacatcttactgcaatactacttaagcaatataaagcaaatataaaaccgtcatattgctaaactatatatcttattcttatttcagtggcgttgatgtatacactgctattgctggggctgttggagctctatatggaccacttcatggtggagctaatgaggtagctataagtagttaatgaagcagtcatgatcttttatgtattgctaggttgaacgtagtgaataaacacaaacactatactgttatttaatatgggaacatgttaatgtgaccttcaattctgcaggctgtcctcaaaatgctgagtgaaattggaactgttcagaacattccagagttcattgaaggtgtcaaagccaggtggctattacagtattactttcttctgttatctagtttttactctttcctttgttagcattgcttataccctgaaaggatagcatgatacctgctctttcagcaagcagagaaaatgatagttttagttgatatttttgtcctgcatttttcctccaggaaacgcaagctctctggttttggacatcgagtgtacaaaaactatgatcccagggcaaaggtcttaagaaaactggcagaggaagtgttttccattgtgggccgggatcctcttattgaggtgtttatccattccgtatttcctgtgtctattgtctgttatatattccttgatcttggtatgctggtcacgaggtctatgatcagggctgtgaatacagagaaaaactactacatttaaaaaatttcttcctattgttttatttaaatgtatttttgtatttttaattttgattacagaatagtatgcttagtgtgtatattgtatatgtttgtgcatacaagtttggcaccattgtgtctacatgcataatcattagatgtcttgtttggtttgaaaaaaaatagcagatcaagtcaaatgaagatcttaagacattaaaaatctctagcaacacctttcatttttcaaatttaaagtattactagggtttctggcactatttttccctgaccaggaaagtacctatgtaatttaatatagattggtcagtatatggacttcaaaagttctaacttctgtatgtaattatttgatcgttcaggtggcagttgccttggagaaggttgcactatctgatgaatatttcatcaagaggaagctatatccaaatgttgacttctactctggattaatttataggtaatccattatttcacgcagttattctaacttggaggataaaaatannnnnnnnnnnnnnnnnnnnnnnnnnnnnnnnnnnnnnnnnnnnnnnnnnnnnnnnnnnnnnnnnnnnnnnnnnnnnnnnnnnnnnnnnnnnnnnnnnnnnnnnnnnnnnnnnnnnnnnnnnnnnnnnnnnnnnnnnnnnnnnnnnnnnnnnnnnnnnnnnnnnnnnnnnnnnnnnnnnnnnnnnnnnnnnnnnnnnnnnnnnnnnnnnnnnnnnnnnnnnnnnnnnnnnnnnnnnnnnnnnnnnnnnnnnnnnataccatacaaggcttgaactaatagttttatgcaatcagggccatgggatttccaccagagtatttcactgttttatttgctatccctcgaatggctgggtacttggctcattggagagagtccttggatgatcctgatacaaagattttgagacctcaacaggttaatttctttctttaaatcattattcttgttatgattttcttgcatattaaaattatatcatgcttactgtattgtgctaatgtagctgtacttcttgtgtatcacttgttttactgggaaatggttttcaagttgtatcatggctgcattatatttcttaacagtggtactgggcaatatttgcgtaatgcattagaactgtatggtaaacttttagagccacctataactaccacactcgtcaattctacctgaagatatacaacatgataagaaacttgggagaaccacatgataaaaattagcagttgtagttggagacacggccttataactctataccagaatcccatacttccaatgtgggattcaagtcccttatcttgcaattgaatccaaacatctcatcacactttgcagcactttgattagttccaggtgaacactgcaatgtcggcatcacgatctccagtgcatgtttgcagttgagaacatggtgaaaccctctgataccaatcaataagaagtttgagagaatcacaccacaaaagttagtcattgaaattggagagtaaaaggctttataaatcctacactagaactagaaccccatatttccaatgtatgacttaagacccaataccttgcaattggatcctaacaacatgtgacgcctttcttatttcaatctcttgcctagtttcatcatatctattttatgcttcaggtttacgttggggaatggttacggcattatacaccagtcaatgtcaggactacatcaagtgatgctgacaagcttggtgaggtggccatatcaaatgcctcaaagcggcggcttgccggatccggggtatagcttacaggctcaatttagttatatgagcaagatgaccaaaaggtgatatataattctcacgaacgtaaataattctttgttgatggctttttataatccaaagttaactttgctatgatcaggatgacatgtctgcataaataatgctactggtgtcacatccatcacctaccagaagaacgatgctggtgtgctttgttaagcctttatgtgcaagtcacgtttcagtacttctactttcaaattatttgttaattgttacaagggaataataaatagataagcatagtttacatatctcatgggagcagtaaaatgtacaattgattagcaaaatgtttgtgttaaagaaataagagagttttctgtgtaccagtacaaattatttcttccccctcccccctatagttgggtgcactaataaagaaaatctgctgaaattcaattagccttttttttcctctcaatatttcatttggactacgcggctaataatctatttttttataaatattttattaaaaacattttaacaatatatcaaaagaaatgttagtaatatattcgttaacatactttattgaacactttttttatcattaattaatattttttttaaatcataaaattttgtacgtctcgctttatttaatgacttttacacataattttgcagctttagataaatttaagcaatagagactttgttagcaatcctcacatgtcaacgtaaattataactaatctttttttttaaggcaaaaataagattactgaataaccctatatttaaggcaccccaatgtgatgggaatagttccataaccatagctccaaactatgattagggattacaaagtatacaactcgtcccgccatgcacatatcatatatataatattttgtgaaaaataattatatttttatgataaaattctaagtctttaatctctaaccatatcactattagagagtgaaaaatactaaacttttaattagaatttttatttagcgattaaaatattaactttagctatcacttttttattttctttatttatgacttgagtttggacgaattaatattatgtttgcttgttttaattaaattatttttattaatttattattattattgttattaaccttatacataaataatatgcgagtcacgggtgcaggtatgaggatatataggtatcaaacatgtacgaaaataagattaaaattattacctacaagggtatgagaccgggtacgggtattatttttaaatgtatagaaactataggatcttacctagacctacctattgtaatccctaattatgacacattgacaccccaaattttgtgcgaactagcaacaagataaaactctttatattgttattaattttaatttttttttctcttttcttgcattgaatacaccacgagttttgtattaaatatgtggcattaagaaactaatttcagttgtctgatccatctgaattaacggttacaggatgatagctcttttctgtttcaacatgtgagccagaggaatcagtataaatactaggtattgatatgctatgtgttccgcttggattctgccagaagtgacttcttatactcttatgtttggaacttgaactgatagctgaatatcccggatccgaaagtagatcttgaatatcagtccaaccttcaagcatgctcacaacttgggacattgttggtctaagtgtaggagatgcattagtacataagagagccacatttagcaccaccatggcctcctcagttgaatattctgaacccaaatttggatcaatcagctccagaagactccctctctcttgcaaaacatatgcctaatgaaactcaaattttagaccaaattgatactaaaactctaaaaaagatattacaatatatatatatatatatatatatgagcaattctagacaaataactatacgttaagattaaaagtgatttaacatttgccgataaaaaactaacaactaacttttgacgataaaaaaaagtgatttaatgattacatgatcactgaaaaaagacaactttgtgatttaatcttttaaaaaaatccctctcacttgatatgcccgtatatgcatgtgtgtatgtacgaactagtaaaatcaataatccataggtcttggtaatttagtatctattgtttgtttgagcctgttatattatgcattaagataaattctacttacccaatcaagaaggtaaacaaaatcctcgtttggcctgaaatttgtattgctctttccactgacagtttccagtgcaaccaccccaaagctataaacatctgctttgtcagttaaatagccacgcattgcatactcaggagccatgtaaccactgcaaaatgaaaaaaagcatttagcattgttaaaataatggatttgactaagagtatactttacagaataaagtacatcaataaccatgggttaaatatttaatgcttgaaattataactaacttcatagtatgatacacatgcatttgatttttaccagaatctccactattgattaaaaatgggtatttttaccatgttttgatatgaaaacaagagaaatagtagcaaaatatgaacttacattgttcctgcaactcgagtgctaatgtgggttttgtcatcttcaataagttttgccaagccaaaatctgagactttagcattaaaatccttgtcgagcaatacattacttgccttaatatccctatgtatgatttttattctggactcttcatgaagataagccaaagctttagctataccaagacaaattttcttccttgttggccaatctagttttgttttgtttggatccctccctgtatgtgattgggagaaggacaatcagttggttatatcaaatgtttgattcaaatggcaagtatggctaaagttcatcaagaagcttaccaaaaagaatgcgagatagacaattgttttccatgtactcatatatcagtattagctggttgccctccacacaacatccataaagcttaacaagattgggatgttgaagtccagatatcagtcccatctcattcacaaactcacgatttccttgtttagattttgaagaaagctgctttactgctattattgtaccatctgatagtaggccctgcatcatgaacaaggtgtatttttttcttgcattagcattacacaggtacacatattcaaactactgaagtgctgattgatctaacaaatctccattacactttaaccatcatgtacgtagataatttttctctttcattaacccacgaaggttatacatgcttgctaatgagtacaaaatacattacagaaattatgattaattgtaagcgttaaattagaattgaatggagatatagagaccatgaagtgtgccttctatttcaaatcaagtaacaaataaattaaccaatggaagataaaagtaccttgtatacacaaccaaagccaccttcgccaattttattcactgcatcaaagtttttggttgctgctttgatttgtcttagtgtaaataatcccgtctgcagatctatgcccctgagctctgaaaataaaaaacaaaatattggtaatttggatttaacaagaaagtttataactttctctacaatatctgccacatagttcatttcatttctatctagcatattaatatatagggcaggcaagtatactctcgtatgttctcttaaagccttgactttggtgaaatggagaaatatcatcaattacaaatcttatatagaagttaattgttgcacttcagttttatgacatttgaataaagtttgtagaaatatttatttaaacaaattgtggaagaagctcaggcaaatagtgctggatacagaaaagatgttgtgttggaaacaaatggaaatatttgttctaactaaaagaattggaagaacttggtggcatattccatacctttatacactggatctttgcctcctaaccatcccatcctcctcatgagaaccagcaccagaagaacaaccactaaaacaccagctactatgccgatggccagtatgacataagttcttttgccatcccctgatggaggtttaaaatctgtgcaagggaaaaatatttacttttagcttttgcataaatgaagaacaaaactgatagaactggatcagataaaaggaaagaatgatgaattttattgataacagaactctagtggaggtcttgtagaggtagacattaatggtaatctttcccttttcctacaatttttaaattcataatggattatggtttcaactgcagtcttatcaagtcagataaagcactaactctaagatgcatgatatgtgacttactagggtttactgaaatagcagatactagaggtccataaactcctcttgtgggtatgccagtggttccttttccagcccagtagaagtgaatcttcaaagtatgttgggtgacagaagcattaaatatcttctcaattgacttgccagtaccaccagcttctcttcggatatcaaagtctttcagcactaaattccccttaattttaggacataataatatattcaatatacatcaatgcacaactcagtgcaaatcaattatttagcatcatttgcaaatcaagcaagtaattgttacctggatatagacgtcaaatactcgccttccaagactgttaagggacctatcattgatgaaaataatctctgcaaagtgaagcttaactgtgtaatttccatttattaggcagaggccatagtatgtgagagcaaggggagaaacacgtgctgttgtgtatagttgtgaattgagtgcagagacattaagtctagaagtattggccacaatatatggatcagagtcaatatcattgtccatgaagtttccagtgctactaagagcccaatcctggctagtgtaatataacattgcagcacccttttgttctctgtcagcttcataaatattaccactaatatttgcttcgtttccaccacaattaatgttcagggagtactgatctattgaaaaaacaatgacaaacagggttgaaaagaaagaatactcagtgtaaaatctttcaaattgtaatggtctaatggtaaaaatagacaactgcatagaaaggtaaaattcgcaaagaatgcaacatattcaatggttgtaataaaaaagaataaaatgtcattacaatcattcaatggtggtaataaaaaaggatatcaaattatcttccagtttaagtttcttagaattagtcaacctatttatttcaaataattagaaaaggaggaaattagtcttaacccttaagaaaaacagttatattcttgtttctttcctaatggacatttattccttcttacattattttgttttatttgaatttctgtacaactctgagcttaagattgttagcaaagaagtaggcagtgaacttttgcgtaaatagaatcataagcaaaatcatgttatatgactatcttaaatttttcttttggtatgaaatcatgttgagttgaaagtttctcatcaacttatttcactcaatttcaggtcacagaatttgagtcaatatttaaaccagcccatcagatcataaaagtaatttaaaagttgtagtatggtcacatacttacattggctaactgaagcagggcatggaaagttcctttttaagcatgaatgaatcttatttctgcaaccaagagagaaatttaaggttatattctagggctactaccaaaaaccaaattttacagaaaatattccaaagacaacagcttactgtgtatttacagatgaagagtagctctcaacaaggtttctggaagaaaaaaaaaaatgttgcagtgataactgataactaattgaagacaacttttactcaaagcttaaataaactaaaactttacatgctcccgcgttgacattcagttggacttgagctgtcccaggagaagttattgtcagagatatcactgtgcaccaaaatatataataaaagatgttaatctcatgttgctaaaggagtgcttatttaatttcagatgcagacatcaacagcttgaagatgccagagaacataattttaaagaccgaaccggtgatcgatccaatcaagatattggatcaatggttgaatcagtgagtcatgaattaactcacatgatccggtctttgttatttttttttaatattcattatatacaacttttaaaattgtaaaatttaatattattgaaaattattttttaacctctattgttattatattatattttttgtcatatatttcaccttttttttaaaaaaaaatctctctttctttatttctttttattatataatgtaaaatattaatttcaattgttgacagtacaagcaactttaataaatgaaatttatatgtgggatttgatatataaaaataatttgctgcgtatgtgacaaaaaacattagatcagtggttagtatagcttaagggtcctgtgagagtgtgaggcatggtttcgtgtcccagtcccttcaatgttaacctcactcatttcgttcacatgcactcggtggcgcatggtccgggttttaaatagagagtataagttatctaactatatatattttttcattttctaaatggatttgttgaaaaaaaattctcatgatggaacttaatataagacttgtcttcttgttgttgaattctaaattctctaaaacatatcaatcacacactacacagtgtatatttctagctgccttattcactgtagccactgaagcaaatattaagatgaagactgaaaattgaaacataacaattcaagtatttaacgtacatatttttgttatttgcgaggacccatcgaggtatgatccctgataatttgttcccggtaagatacctgcattatctaatacattttgtttcgtcaaaattaaaaatgaaatgtatcaataacatattttattcaacgcatccacttacatgaagtctactttgtcaagttgggcaaaagattcaggtatctctccactcaagccattgtaactcaaatctctacagcaacgaagataaataaataaacttgttttatgtaacgaaagggttaataattttttatattataaaaaatgtattttatcttcaactttaagatgttcataaatataagcatgttctacattttatagctgtctttataatcttccttcagtattattcaaacaaagtgatatggtgttgatgtatagcaaggtctatgatagaagttcataagggacacatgaatcatcagagtaacaaccattcaactttgaaaaattaatctacaccggaaagactatagacatatctgtttcatttttgcttctctcttaatgaagtttagtgctagttagtaattacccatgtttcacggctataaacaaaataataccataactgacctacaaaaccttgtacctggaaaaaaaattatatttcagatctagataaaattatagaacattattatgagcgtagtgtcaatattataatttatatgaaaatatggcttagccaactttgaattgattctatgagatcttctcaagtggaacatgatcctcaaagtaatatatcatgttgtcaaaactgttgtaagttatttgttgaacaacttacaagattttcagtttttccattctcccaatatattctgggatttctcctttaatcatgcattttctcaataccctgcattatgatgtccaaataaaatataggtcatttttataaagacttcaagagaaagaagcatttaagtcattgaacttacagtgtcttcatggatttcaagttatttagtggtgggaaagctgagcttttactagcttttaggtcagttatcctcctaagtatcaaagaataaataaaacaatcacttaacatattcatgttctatgaccaaaacataaataaaataaagaattacaaacatacaaatcacttaatcttgtcaaggcagaaatgctagatggtatgggaccctcaagagagcaaccgtgcatatgcctgtaaccccaaaagaaaaaagttaacatgataaagtagtctatacaacaaatacaacaagaaagaacgaggtaggaaacttacaacttttcaatcaatgtccagttactaatgaaatcaggaatcttcccaaggaaattattgtcacttatcctcctaaaatgtgtttcccaaaggttaatcagtatgcaaggaaatgtcaaaatttaaatgtaacaacaataaaagaacaaaagtgataaacaaagctacagattctttaattttgtagctccttatatgaattgattaagaaacttgcagtgacttgcattaacacctcactacctaatattaaatagaatcaaagtgactcatctttgtgcatctttaactgtcagattgtaaccatgtgctagaatatgtcaaattgataagaacttacaaatcaatcaacttggttaacttggaaagcacgggtggcaatgctcctgtgaatccattggatgacagaatgctaaacaaacatgatttactcatgttaaaacactacagaataatatgtgagggggaaaatagaagcagatattgagattccaaatttccaataagcacacaaagaagatcaaaagaattacagtttttctaaattggtcaacttcccaatctctgttggaatgtggcctgaaaattgatttccttcaatactcctgtaacattcatacaaatatttaatttaaacaaagctgcagaaataaattggaaattatactaaaccaacaatcctggatcacctatgccaagcttcctttaggtaaaagcaaatatatcggcaaaaggtaaaagctacctttagatattccaaatatatctttcacttcttttttttactttctatttttctttaaaaatacattcaatttatcactaagctaagtgacggagtaaacatacaattcatttgaaaataaagaaatgatttcaacatacaagtttctgagggttgtgatattggtgagaactttggggaatggccctgacaatttgtttcccataaaagagctgcacattcaattcacaagaatctttagtgtcactctcaagttgtttactgtatacagaagaaattgaagagacaatgcagagaaaccaaagggtgcaaagcagaaagttcttacagatcaaccaagcgcatggtaccccattgtggaggtatagaaccagtgatgatgttacgactaaggtctctgtttgaaagtgcaagacaaagtaagtggacttcaccattccatagggaacatcatgcagagcaaaaaaaaagtcatggtttcaaaactgagatttgatatcttacaattcttggagatgatgaagcttggaaaactctggtgagagactacctgacagattctgagccttcaagaatctgttcatttagaatatgaaataaaaagcagaaattcagaatttataattatatggtggttaacatgattattccaagatatccaatcaataaacaaatacagtacatgaaatgagaaaagaaacaatctagtgagtcccttgtgtacaaaagttaggaattcctcacaaacagattaaatctaaaaaattaaccaaagtagaatttagaattaattcaaaaatttaattagaatgtattgacagcaggaccgtgtttaggaattttagggcattagtcaaatttttaaagaaacttaatattatataaattatttcttaaaataatttttttagtttttaccaattaaactcatttttatatattatttttatgaatagtaagacatttataagagtattatatattgagatttttttaacttatttttattttaacttttgaaaaccaagttcctactttctatttgattttttcctattactacaaatataagaataaaataaagaagcactgaataatataaacaatttttttataaaaaaaaaatnnnnnnnnnnnnnnnnnnnnnnnnnnnnnnnnnnnnnnnnnnnnnnnnnnnnnnnnnnnnnnnnnnnnnnnnnnnnnnnnnnnnnnnnnnnnnnnnnnnnnnnnnnnnnnnnnnnnnnnnnnnnnnnnnnnnnnnnnnnnnnnnnnnnnnnnnnnnnnnnnnnnnnnnnnnnnnnnnnnnnnnnnnnnnnnnnnnnnnnnnnnnnnnnnnnnnnnnnnnnnnnnnnnnnnnnnnnnnnnnnnnnnnnnnnnnnnnnnnnnnnnnnnnnnnnnnnnnnnnnnnnnnnnnnnnnnnnnnnnnnnnnnnnnnnnnnnnnnnnnnnnnnnnnnnnnnnnnnnnnnnnnnnnnnnnnnnnnnnnnnnnnnnnnnnnnnnnnnnnnnnnnnnnnnnnnnnnnnnnnnnnnnnnnnnnnnnnnnnnnnnnnnnnnnnnnnnnnnnnnnnnnnnnnnnnnnnnnnnnnnnnnnnnnnnnnnnnnnnnnnnnnnnnnnnnnnnnnnnnnnnnnnnnnnnnnnnnnnnnnnnnnnnnnnnnnnnnnnnnnnnnnnnnnnnnnnnnnnnnnnnnnnnnnnnnnnnnnnnnnnnnnnnnnnnnnnnnnnnnnnnnnnnnnnnnnnnnnnnnnnnnnnnnnnnnnnnnnnnnnnnnnnnnnnnnnnnnnnnnnnnnnnnnnnnnnnnnnnnnnnnnnnnnnnnnnnnnnnnnnnnnnnnnnnnnnnnnnnnnnnnnnnnnnnnnnnnnnnnnnnnnnnnnnnnnnnnnnnnnnnnnnnnnnnnnnnnnnnnnnnnnnnnnnnnnnnnnnnnnnnnnnnnnnnnnnnnnnnnnnnnnnnnnnnnnnnnnnnnnnnnnnnnnnnnnnnnnnnnnnnnnnnnnnnnnnnnnnnnnnnnnnnnnnnnnnnnnnnnnnnnnnnnnnnnnnnnnnnnnnnnnnnnnnnnnnnnnnnnnnnnnnnnnnnnnnnnnnnnnnnnnnnnnnnnnnnnnnnnnnnnnnnnnnnnnnnnnnnnnnnnnnnnnnnnnntatgaatgttaaaattgttgactttcgtaattattatctaaaaactaattgtgttatctatgaaaaataatactacatatttttggtcattgacatgtatgtgagactagtgattagtaccccttatgtggtaaccatcaacactcaacagttgatctagtgttcagtaaaccctttcccattctttgaacataaattaatcaacatttcctatttaaaaaatcaacaaattactttttactagacacagttcgacagtaacaaaaaaaaaaacaattagtttgaagcaaaaacatgaacgaatagcccaacagatgaaaattaaaaattttaagaaaattttgacgagaaaaaaagataaagacagcacatcctttttaaagtcaaagatttgcaacttgcatcaggtcggttgagttgtcgatccgagacccgtgtccgacatttcaaacttaaatttttgtatgttaatgagttctggtacttaaacataatgaaatcaacattatacatgataagtatataattaatttttgtctctctcaaaaaaaaattgtcagttacttttttatttttttttatttttctggtatacatttattttaaaaatataatccaagaaacattttcctctcttcaccaaaaaaaaaaagaaacattttcctcttctcatttagtgctacgcgttactttgacgagtcacaaccacaaatgtgcatgattaagattcgcgatggtcaactttttgaagaaggcagaatatgcataaatctttggaaatattctaggtaaaaagaaaattagtagaaatacacccattaccattttcttcctttttgcttcaattaaaaaggttcttggaatccagctatgaaaacatgaatttataactgaacaattttttttctcttaaaaaaaaatatgtaactgcacgtgaaggtttgatggtaactttaggtgctgtctgtagtaataaataaaaatagttgaagcaatatggccgtgaagattaattaattaatcaaaacttgaagaaaatcatcttcattttcctaagtgcacatgtgattccatgtgattatcttccataatctgagttctcgaaaacacaaagaataccaaaaacttgattgaaacaaattaaaagagagagaaagagcattacatgcttacaacatggcaagaagaattgtgattgaaggaacaatcacatatcacagaactctcaaagcctttcctagcatcagacacattccaattcccttttccactgcaaggatccaccccaaagtcccagtctttcttcccaatcttgcttcctatttccttcaatgccttcactgcacacaattcaaccaaatcaacttcatcgatcagagaaaaagcaaacaacattcaaatgagtcttacggtaccacagatgcatatgcatagaattattgaattagaagctatgatgaaatgaaacaaccaatccatgattttcttttgctgtccatagatccaaacaaaagaaatgagtgagacaaaaccacttttgactctgcctcaattttgcaactctatgttccgatccaaaacatgggaaagcagaaaggattataaactaatgttatgaagtatgaactgatttgatacaagtataaaaagtgtgtgaacagcaatgagtgaaggaatgagttttaccctcttgagtgttgagcttgggagtggctgcagaagccaagtgtgagaggaaaatcaatgaagtggaaccaaggaggagtaaaaagagcatcttggaataatctaagttggtctccatgaaagtgttttcactctttggttgttcaagcaggaagaaaatgatagggagtgagtcagagactattatatgctatcagatgaggatagacactgggttgcataagtggtgatgttagtagagtctgtactatggtcgggagcatgtgacaaaaaaaaaaaannnnnnnnnnnnnnnnnnnnnnnnnnnnnnnnnnnnnnnnnnnnnnnnnnnnnnnnnnnnnnnnnnnnnnnnnnnnnnnnnnnnnnnnnnnnnnnnnnnnnnnnnnnnnnnnnnnnnnnnnnnnnnnnnnnnnnnnnnnnnnnnnnnnnnnnnnnnnnnnnnnnnnnnnnnnnnnnnnnnnnnnnnnnnnnnnnnnnnnnnnnnnnnnnnnnnnnnnnnnnnnnnnnnnnnnnnnnnnnnnnnnnnnnnnnnnnnnnnnnnnnnnnnnnnnnnnnnnnnnnnnnnnnnnnnnnnnnnnnnnnnnnnnnnnnnnnnnnnnnnnnnnnnnntttatattgtgcattgcattatttttttttttttttgttgtgaaaatatctgtaaaatgctcagttgcaacttgatggaagacaacttggtaaaggatccagagttaattctgatccttctgatgaggggttaatgcctcttatatcttgattaacaaccttcctaaaacagatctcttaatgtagaagtagttgaatagtcttgaatgaatcaattaaattgtttgtggtttagacttatatagtaataattttctggtgagtttctgctaatagttttaaaatgtaatttaccccccacccaattttattactttaaggatagaccacccaaatcaattttattactagctttaagcacaaaccatcttacccaattttattactttaagcttaaaccaaaagaagttacaaggaagaacggggtttgcaatcctatcgcgtgggaaacgtgcgtttgagacgctaaggaaaaagctcaaagttggatgtgggaaatgtgtatgcaaacattaattatagaattcggattggttgcgttgtggccatatctcgatatcgcttgccttcccagggttaaaaaagaagaaagaaaaactcctaaaatttagattgagaatatttaaaattaaatcaagtctcctgttatagtagtataacttctacttttttacaatttaaacgtaactaaaaatttattgttgtgatttacatttgtgtggataagaattaaaacagggtaaataattcacaaaaattaaaaaaaaaatcataagaatcaaagatactgagaatttataacaattcatatattttgtataaccaattagactcctttggttgtaattttcaaatttgtaataattaagaaatgagcaacatagctcgaaatgatgagactagataacattttgttttcttttttcaattttcacaactccctcgagcgtcgtattgcattgcctccaacatttatcttcaattgaaagaaaagcacggtatttgatctatgtagaattgaccatcagaattcaacattagaataattggatctgttaatttaatttggaagtgttaaacgcactacataggtttgcatctattcatgattcatgtatctttgttatccttattgttgattcttgatttaattgtatatttaatattttaattgaatatatctcaacctagctctagtccaaatttaacatattttaattttgtaaagaaaaaaaacttactaaaaattttagaagaaccaaattcgaatatttttttaattttatgagaaaaaaaatcatatttagcctaaatttaaaaattgattttagtttctacaaaatttaacgtctaattttggtcttcataaaattcaaaagcttaattttaggtcctcataaaaattaaaaagttgattttaatgctcataaaaatgtaaaatattatatttttatttttaatatagtatattaagtaatattaaaaaaaataacaacttttatattcataactcaataattattcttttttatcctaaaagaagagttacggtgacagcggcactagaagcaattttgacccaaaactagctcttgagccaacaaattaataacaacttttttctacacaaatctttcgttaatctatataattgtattatatctttataactaacattcataaattattattttattcctataactattttcacaaatcatccattaatttttattatctttctttttattttaaaaaacatagaaaaatagttaaatatgaagtatccattttcttctaatagttaataatgttaatattacttccttcatttctaattataagatacttttcagaaatttatttgtctttttttataaaactattttctaatttttagattcattaattttttttacatatccttaattattctctcttaaaatattaatgaaaataattaaataattagagataagaaaattataattttataatgatactgtaatgaattatcagatttaatgtaattaattaaattaatcattttcttaaaaatataaattaattaaaatgattttataactaagaattgaaaaagtaatatattacattaataaatcaagctgacctcgtccatcttgtcccatctattattgggttttaatcgaggggtttaaacttacataaataaccttaacaaagttttaagatacgtagaatcaaaaatatatctgtcgcaacccatccatggtcattcctaacaaagttatgaatattatgttgtttttttcttaatataatatattatattaaaataaaaatataatattttatgaggactaaatatcaaacttataaataaaaatataatattttatgaggacaaaaacccaaacttataaattttatagtaattaaaatcaaatttaattttttaagagacaaaaaaaattctcttgtcatatgtgataatcatgtaccgaagtgaataacacatgatagatgtgtcattcaaaatgttccctaagcatatttttaatgaaaaaattttaagtgagttttttaaattattttttgtgatttttattataatgtcatgttatggtaagaaattcatacacaaatttatttcaatggtaagaaactctagaaaatttcaaaaattcacatttttatatttnnnnnnnnnnnnnnnnnnnnnnnnnnnnnnnnnnnnnnnnnnnnnnnnnnnnnnnnnnnnnnnnnnnnnnnnnnnnnnnnnnnnnnnnnnnnnnnnnnnnnnnnnnnnnnnnnnnnnnnnnnnnnnnnnnnnnnnnnnnnnnnnnnnnnnnnnnnnnnnnnnnnnnnnnnnnnnnnnnnnnnnnnnnnnnnnnnnnnnnnnnnnnnnnnnnnnnnnnnnnnnnnnnnnnnnnnnnnnnnnnnnnnnnnnnnnnnnnnnnnnnnnnnnnnnnnnnnnnnnnnnnnnnnnnnnnnnnnnnnnnnnnnnnnnnnnnnnnnnnnnnnnnnnnnnnnnnnnnnnnnnnnnnnnnnnnnnnnnnnnnnnnnnnnnnnnnnnnnnnnnnnnnnnnnnnnnnnnnnnnnnnnnnnnnnnnnnnnnnnnnnnnnnnnnnnnnnnnnnnnnnnnnnnnnnnnnnnnnnnnnnnnnnnnnnnnnnnnnnnnnnnnnnnnnnnnnnnnnnnnnnnnnnnnnnnnnnnnnnnnnnnnnnnnnnnnnnnnnnnnnnnnnnnnnnnnnnnnnnnnnnnnnnnnnnnnnnnnnnnnnnnnnnnnnnnnnnnnnnnnnnnnnnnnnnnnnnnnnnnnnnnnnnnnnnnnnnnnnnnnnnnnnnnnnnnnnnnnnnnnnnnnnnnnnnnnnnnnnnnnnnnnnnnnnnnnnnnnnnnnnnnnnnnnnnnnnnnnnnnnnnnnnnnnnnnnnnnnnnnnnnnnnnnnnnnnnnnnnnnnnnnnnnnnnnnnnnnnnnnnnnnnnnnnnnnnnnnnnnnnnnnnnnnnnnnnnnnnnnnnnnnnnnnnnnnnnnnnnnnnnnnnnnnnnnnnnnnnnnnnnnnnnnnnnnnnnnnnnnnnnnnnnnnnnnnnnnnnnnnnnnnnnnnnnnnnnnnnnnnnnnnnnnnnnnnnnnnnnnnnnnnnnnnnnnnnnnnnnnnnnnnnnnnnnnnnnnnnnnnnnnnnnnnnnnnnnnnnnnnnnnnnnnnnnnnnnnnnnnnnnnnnnnnnnnnnnnnnnnnnnnnnnnnnnnnnnnnnnnnnnnnnnnnnnnnnnnnnnnnnnnnnnnnnnnnnnnnnnnnnnnnnnnnnnnnnnnnnnnnnnnnnnnnnnnnnnnnnnnnnnnnnnnnnnnnnnnnnnnnnnnnnnnnnnnnnnnnnnnnnnnnnnnnnnnnnnnnnnnnnnnnnnnnnnnnnnnnnnnnnnnnnnnnnnnnnnnnnnnnnnnnnnnnnnnnnnnnnnnnnnnnnnnnnnnnnnnnnnnnnnnnnnnnnnnnnnnnnnnnnnnnnnnnnnnnnnnnnnnnnnnnnnnnnnnnnnnnnnnnnnnnnnnnnnnnnnnnnnnnnnnnnnnnnnnnnnnnnnnnnnnnnnnnnnnnnnnnnnnnnnnnnnnnnnnnnnnnnnnnnnnnnnnnnnnnnnnnnnnnnnnnnnnnnnnnnnnnnnnnnnnnnnnnnnnnnnnnnnnnnnnnnnnnnnnnnnnnnnnnnnnnnnnnnnnnnnnnnnnnnnnnnnnnnnnnnnnnnnnnnnnnnnnnnnnnnnnnnnnnnnnnnnnnnnnnnnnnnnnnnnnnnnnnnnnnnnnnnnnnnnnnnnnnnnnnnnnnnnnnnnnnnnnnnnnnnnnnnnnnnnnnnnnnnnnnnnnnnnnnnnnnnnnnnnnnnnnnnnnnnnnnnnnnnnnnnnnnnnnnnnnnnnnnnnnnnnnnnnnnnnnnnnnnnnnnnnnnnnnnnnnnnnnnnnnnnnnnnnnnnnnnnnnnnnnnnnnnnnnnnnnnnnnnnnnnnnnnnnnnnnnnnnnnnnnnnnnnnnnnnnnnnnnnnnnnnnnnnnnnnnnnnnnnnnnnnnnnnnnnnnnnnnnnnnnnnnnnnnnnnnnnnnnnnnnnnnnnnnnnnnnnnnnnnnnnnnnnnnnnnnnnnnnnnnnnnnnnnnnnnnnnnnnnnnnnnnnnnnnnnnnnnnnnnnnnnnnnnnnnnnnnnnnnnnnnnnnnnnnnnnnnnnnnnnnnnnnnnnnnnnnnnnnnnnnnnnnnnnnnnnnnnnnnnnnnnnnnnnnnnnnnnnnnnnnnnnnnnnnnnnnnnnnnnnnnnnnnnnnnnnnnnnnnnnnnnnnnnnnnnnnnnnnnnnnnnnnnnnnnnnnnnnnnnnnnnnnnnnnnnnnnnnnnnnnnnnnnnnnnnnnnnnnnnnnnnnnnnnnnnnnnnnnnnnnnnnnnnnnnnnnnnnnnnnnnnnnnnnnnnnnnnnnnnnnnnnnnnnnnnnnnnnnnnnnnnnnnnnnnnnnnnnnnnnnnnnnnnnnnnnnnnnnnnnnnnnnnnnnnnnnnnnnnnnnnnnnnnnnnnnnnnnnnnnnnnnnnnnnnnnnnnnnnnnnnnnnnnnnnnnnnnnnnnnnnnnnnnnnnnnnnnnnnnnnnnnnnnnnnnnnnnnnnnnnnnnnnnnnnnnnnnnnnnnnnnnnnnnnnnnnnnnnnnnnnnnnnnnnnnnnnnnnnnnnnnnnnnnnnnnnnnnnnnnnnnnnnnnnnnnnnnnnnnnnnnnnnnnnnnnnnnnnnnnnnnnnnnnnnnnnnnnnnnnnnnnnnnnnnnnnnnnnnnnnnnnnnnnnnnnnnnnnnnnnnnnnnnnnnnnnnnnnnnnnnnnnnnnnnnnnnnnnnnnnnnnnnnnnnnnnnnnnnnnnnnnnnnnnnnnnnnnnnnnnnnnnnnnnnnnnnnnnnnnnnnnnnnnnnnnnnnnnnnnnnnnnnnnnnnnnnnnnnnnnnnnnnnnnnnnnnnnnnnnnnnnnnnnnnnnnnnnnnnnnnnnnnnnnnnnnnnnnnnnnnnnnnnnnnnnnnnnnnnnnnnnnnnnnnnnnnnnnnnnnnnnnnnnnnnnnnnnnnnnnnnnnnnnnnnnnnnnnnnnnnnnnnnnnnnnnnnnnnnnnnnnnnnnnnnnnnnnnnnnnnnnnnnnnnnnnngaagggttgtcaacaccgcgcgaggactctctctatcagcaacattcttctccacatcttggaaactctttagactttaatattaatattggcttgttaattttaaagttaaatatatgtattttttgataaaattaattttaaatattaatttgtttcaaaagtaaaacaacgtactcttttaactagcaactaatttttcaacatatatatatatatatatatatatatatatctttttgtattttttttctgaacttgagattgacgaaatcacaatcatggacttgtccaaacatatagctacaaaaatattcagaatccgcactgtttcttttccaatgtcctacttgtgattcttgataaagtaataatgacttgcatataactctcaacagctaccagaaggataatgattcggagttcggaccaagggaagaagaaagtaacatttttgtgtcgtcttgcattggaaatttggaattaaggaggaaagggagatagcgtgtggggacacaaaagaaagaggcagaaaataaatagaatagaacgcgttttaatttaaggaataaaatacaaaagaaagaggctactgaatgtttaatgctcatgatcaatgaagtctcacgtacgtaccctgtgagtgaaaagaatatcaattctaactcgaccattccaaattataattttgagaagaattgaatatgaatcactttataaaaatgatctataagtttgaaccaaaactatttttataaagtaattcagtttagttctttaaaaaaacttaatgatatatgtatgaggaaaagaaaaaactaaactaaacaccgaaccaagttaaaagttannnnnnnnnnnnnnnnnnnnnnnnnnnnnnnnnnnnnnnnnnnnnnnnnnnnnnnnnnnnnnnnnnnnnnnnnnnnnnnnnnnnnnnnnnnnnnnnnnnnnnnnnnnnnnnnnnnnnnnnnnnnnnnnnnnnnnnnnnnnnnnnnnnnnnnnnnnnnnnnnnnnnnnnnnnnnnnnnnnnnnnnnnnnnnnnnnnnnnnnnnnnnnnnnnnnnnnnnnnnnnnnnnnnnnnnnnnnnnnnnnnnnnnnnnnnnnnnnnnnnnnnnnnnnnnnnnnnnnnnnnnnnnnnnnnnnnnnnnnnnnnnnnnnnnnnnnnnnnnnnnnnnnnnnnnnnnnnnnnnnnnnnnnnnnnnnnnnnnnnnnnnnnnnnnnnnnnnnnnnnnnnnnnnnnnnnnnnnnnnnnnnnnnnnnnnnnnnnnnnnnnnnnnnnnnnnnnnnnnnnnnnnnnnnnnnnnnnnnnnnnnnnnnnnnnnnnnnnnnnnnnnnnnnnnnnnnnnnnnnnnnnnnnnnnnnnnnnnnnnnnnnnnnnnnnnnnnnnnnnnnnnnnnnnnnnnnnnnnnnnnnnnnnnnnnnnnnnnnnnnnnnnnnnnnnnnnnnnnnnnnnnnnnnnnnnnnnnnnnnnnnnnnnnnnnnnnnnnnnnnnnnnnnnnnnnnnnnnnnnnnnnnnnnnnnnnnnnnnnnnnnnnnnnnnnnnnnnnnnnnnnnnnnnnnnnnnnnnnnnnnnnnnnnnnnnnnnnnnnnnnnnnnnnnnnnnnnnnnnnnnnnnnnnnnnnnnnnnnnnnnnnnnnnnnnnnnnnnnnnnnnnnnnnnnnnnnnnnnnnnnnnnnnnnnnnnnnnnnnnnnnnnnnnnnnnnnnnnnnnnnnnnnnnnnnnnnnnnnnnnnnnnnnnnnnnnnnnnnnnnnnnnnnnnnnnnnnnnnnnnnnnnnnnnnnnnnnnnnnnnnnnnnnnnnnnnnnnnnnnnnnnnnnnnnnnnnnnnnnnnnnnnnnnnnnnnnnnnnnnnnnnnnnnnnnnnnnnnnnnnnnnnnnnnnnnnnnnnnnnnnnnnnnnnnnnnnnnnnnnnnnnnnnnnnnnnnnnnnnnnnnnnnnnnnnnnnnnnnnnnnnnnnnnnnnnnnnnnnnnnnnnnnnnnnnnnnnnnnnnnnnnnnnnnnnnnnnnnnnnnnnnnnnnnnnnnnnnnnnnnnnnnnnnnnnnnnnnnnnnnnnnnnnnnnnnnnnnnnnnnnnnnnnnnnnnnnnnnnnnnnnnnnnnnnnnnnnnnnnnnnnnnnnnnnnnnnnnnnnnnnnnnnnnnnnnnnnnnnnnnnnnnnnnnnnnnnnnnnnnnnnnnnnnnnnnnnnnnnnnnnnnnnnnnnnnnnnnnnnnnnnnnnnnnnnnnnnnnnnnnnnnnnnnnnnnnnnnnnnnnnnnnnnnnnnnnnnnnnnnnnnnnnnnnnnnnnnnnnnnnnnnnnnnnnnnnnnnnnnnnnnnnnnnnnnnnnnnnnnnnnnnnnnnnnnnnnnnnnnnnnnnnnnnnnnnnnnnnnnnnnnnnnnnnnnnnnnnnnnnnnnnnnnnnnnnnnnnnnnnnnnnnnnnnnnnnnnnnnnnnnnnnnnnnnnnnnnnnnnnnnnnnnnnnnnnnnnnnnnnnnnnnnnnnnnnnnnnnnnnnnnnnnnnnnnnnnnnnnnnnnnnnnnnnnnnnnnnnnnnnnnnnnnnnnnnnnnnnnnnnnnnnnnnnnnnnnnnnnnnnnnnnnnnnnnnnnnnnnnnnnnnnnnnnnnnnnnnnnnnnnnnnnnnnnnnnnnnnnnnnnnnnnnnnnnnnnnnnnnnnnnnnnnnnnnnnnnnnnnnnnnnnnnnnnnnnnnnnnnnnnnnnnnnnnnnnnnnnnnnnnnnnnnnnnnnnnnnnnnnnnnnnnnnnnnnnnnnnnnnnnnnnnnnnnnnnnnnnnnnnnnnnnnnnnnnnnnnnnnnnnnnnnnnnnnnnnnnnnnnnnnnnnnnnnnnnnnnnnnnnnnnnnnnnnnnnnnnnnnnnnnnnnnnnnnnnnnnnnnnnnnnnnnnnnnnnnnnnnnnnnnnnnnnnnnnnnnnnnnnnnnnnnnnnnnnnnnnnnnnnnnnnnnnnnnnnnnnnnnnnnnnnnnnnnnnnnnnnnnnnnnnnnnnnnnnnnnnnnnnnnnnnnnnnnnnnnnnnnnnnnnnnnnnnnnnnnnnnnnnctcttaattagatattttcaacactttcttttttcttttttatataaataataaatactaactttgtgagtttcagaatcataccccctttcagatagaagcatgagagtatagagacctgtttgaaattatcaaatatgattgatacttggaagtcgacttcaaccatgtgattagtttaatcatctcctacagagattcatccctcaatgttctatgtaaccttttttacggtatggtgtattaatgacttaataaattagatttcaaaagtggaacgtagaatgaacatctcacgatgcatcaggacattttctgcacaacaattaagttgtatatgaaatcaaaattaacccatcatctgctcattacattacaaatatatatacggcatgacatggctcatgcagaacaatgcccatttcttctccatctatatgcacggggtataggtatacgtatacatatatgtgctacaaatcaatattgctcagtcatactcaaactttaggaactataatttgtagaaatccatccctgaaaatggggaaagaaacaacaaattatcagcttcaaatgtttataggtacagcacatatctttgaacttgtgcaaaaccacacacatcacatactagtccctgaaattattcaagtcactttcgaccccatgcatgcatatttttaaaataaaataacatgaagtcacatacaaattcagtaaaccaaaacaaaaaaagtacacttattttaagctatatggggaaaccttttcagttttcagcagagcagaatagaggagaaaggtaggggaaagagttccccttgagtagatgtgataaattatatagcttttacattgagttgaaaaatttatgaatcatcatggcagtattctagcttccaaacaaagcattaggattggcatagtattctagcttccaaacaaagcattaggattggcatagattcagtttttttttttttgtgtgtgtatttaaaataacataatgatctaagtaccaaagcagtataaaagtgatggccatcattacagtagctagttgcagcagtagtgaatcagctattttagcctaacagaacattaaatatccaataaatttctcagtgaactcaattgaacttcaaggttacaatttgactcaccattttgtgttagtaaaagagatcactattcactagcctggtactgttggctagcagtgtgatagcttgcagccaaaatcttcctaatgtatgttaggtacctaggtattttattactacttccagtttgaattttgttagtaataatcatttgaaagtcctgtgactgagccagaaaccaaagttactaaaaaattaaataatgcaatagaccaaattagatgaggttatatatatatatatatatatatatatatatatatatagtttgagaatggagttaaaatttgaggctataatcaagagacacgtgcataatactaagatataacttacaaaaattcagctgatattctgtccttgttcacaccagtaggaagtggccagaccaccccatatgatccatatagtatttccctccgatgatatgaagaaaaggaagcatttggacaacctgcaactgtccaagagctagtagagcgtctacctttaacacacaacctgtcacagttcacacattggctcttttatcacaaagaaaggaggtcctatactacgaaagatctatgaccacgaatgtccaacattaaaatttccatttagcgtttcacttccagaatttatgctttatattacaatgcagaaataatgtataaagtttgtattaatagacaagaccctcccccggtacacaaatgaaagaaaaactcaacacaataatggcatagacaaaagtagagtatccaacaatattttgttttgccttatcttttccttcaccactcccttttctattgattagggagaactaaatgcttaataccacaaattgcagagtattacaattaatatgagggtgtatattagagattcttcttactttagttcatcaacctccactcttatgtcactgatactgacacctggaacttccactgtgataacatatttgccttctgattctgcaacatccatccttggagaccactcaattcctgcaaaaaacaaaggtcacaaaaattatagagtacatagtctatgcactggtttgtgattggttttttcatgttcgttcaatcacaaatcatcttgtgtgaaaatttgtgattcgttaacttttacaatattaccttaaaaatcaaattaataatgatttcttatatgttgacaatataaaaaaaattacactaacaatgcatataaattaaactcaaaataatatacttcgatctgtttcttatagctattcaactattattacttcaaatgtctttccgagttcaaagttctaaccaccaatttcagaagagcacgttttcttttcagaatgtaactgatctcctctaatctgtctggttggcctagcaaatgtaggaggatcaagtgtactaaaatcacagccctgctcctgagccattggttggaccactgaatttgtgaaaactgattctgcccttgcaggtctagcaaaacatggtgctcttgcattagaaagacaatcagatgcagtagcaccatgatttgttttaggagcaataaaggaagttgagccaccctgaaagtgtatttgtattaaataagccagtgagaaatgaatcacttacccaaaaaaagtacatcgaacattgttaagtatttcaataataagaacacttaagtacctcttcaattgaagtctgcctcataaaataaccaagagaagcagaagcttggcgtgcaaaatacaccttattatcacatctccggagtacagagttcagactgccactgcagttctgatggcggtaggaaaattgatgaacaaaatgaattacaaacaaatattcaagaaaaaaaaggatagtacgtacagattaatttattagacattgtaaaacaaaagctataaaatcaaattagtggtctactaaaacatataataaaggtgtagcatatggaaattctgaattacggaaacacttttaaatatcaaaaagggacaaagatgaaggaaacacttaagtttaaaaactttgaagttgcttgtagcctacaaaaatgcattgatttgataagagtgttcaagttattattgcctaagccaatcataaaagaaaaggccaacttaaacaattaaatttccaatgctgaacatcaagatcaataaacactttagcataataaatagtgacatcaacagtacaagctaatgcgtctcataatttaacgcaaatatgcaatatcaactgggttaaactatatatagaaaatcagacactgaataggtgatatttcacaatttattcaaagctagctgtatgagatgaaagaacatattttctcgtattcaaaaccaatgagcagtctagctactttcatcctttagccaataaaaaatgaagtgctagtccactttatacaatactcaaattatatgcagtttgattgtcctatgatgacaataaatgaagattcctattagatggttttttctgttcacatgaaaaggagaacaagggccagttagcaaaagatgagaaacataagttcaatttccccacttagctatatctaactcccaaataattcccatgtgtcgagaaaaacataactgaattcaaatgaattcctttattttccatcattatctagtgaaccatgaacacataagtaaaagaacataatatgttaccataggcagaacgttggtagttgaaatatcatcattgggtgcaaagtgagcagcaatcatgtgaattctgcgcttcactgactcactctccatttctaccaataaaaatgcttcacaaaaatttgagctaaaaagataatgcaggatggcaccagcatcagagtatcaagaatataagcagagggagtcactactgaatggaagatatttttaagaaaataacattagtggggcccattaaatctaaatatcttagggaactgaagataatgtccgtcagatgccaccatagcacctggacccaaaatatcagtttgagactactgtagtctgtagtacttcttttttagaattttaggtacccttgattggaattatcttattattatcattataatttaatatttatttttaaaaccttacaaaaatttataattacccataaaaattaaaataatataatataaaatgaaaaaaaaaatgtaatagaaaatgatttttttattgcgtgtcaatttaatactaagtacgttataaatttaaatatcagtttattagttagagaaattatttttatcatttatatagtgtgtgtttaatttctttttgttttcattaaaaaattatgcaccttaaatataattacatagtttactatgaaaattttaaaataaataacaataaataaaattagtaggtttttttttactttaaaacaaaaatacaagcatactctttcttaattaatatcatgttttattctccataattattattttcctttattttattaaaaaccaatgaaaatatctcccacctggttgtctcattcgtgcagaaacaatttgtactatatatatggaaaattttacaaacaagataacccctctgtgcctgtccctggctacaggtttgaattctgaacagtttttctctgaatttttttttggtgaaagttgttctctgaatgaatggccaaagtatagagtaactaagacaagaaataaagcagagtacaaagacatcgaagctgtgcaattctatatacctatatgcattaaacagaatatcacagaatacactgctgacatagagtaagtgcttatttgattgtcactacaaatctatctcacacgttacatgagttttaatataaaatctgtaactaaagataatcagtttaatggctaagcacgactttcaagatagttatagtaaaaatcaataaactcatcctaatgatttgtcataaaataacagtataaaagtactttaatttagatatacttgtttaacaattcaaaatcaattctatcaaaaattctaaaacaaccaaacactagctagtagtagtaaataataataataataataataataataataataatagaatagaaagaaattcataaccatattttcatttccaaagatcaaagcctttatgttctagaggggtaaatactggaacgtggcttgttttatggtataaatatctgtgcttccaaattcaaataatcaaatttaaccactcgagacaaaactgtagaagcctaacatttgttgtgagcattaagaaggaagcaactgagaccattaagtcaaaatgcagaatagaagcaaactacttaaacagacactaaaaaatggaaacgatgattgcagctttgtgatcaatacaaattattaaaacctgcgatgtgatgcttgtgacaaattgtttttgaactgtaatattttaacctttagctagtgtcaagtgaaacagtttaacttaccaataaacgaaaagtgtgacactgatattgcagctttatcaaattagttaataaaaacttccacgcggatttagatttgagttgtgattctttagaaaagttttctagttttctaaggccacctatgtgaaagttttcttttcttgataatatttgttaatagatgctgcaagatttgcataatccccaatgtgtgtactctgaatcactcttactccaatgcccctgctcctgctcaacaaaaagaaagaaaagcaaatgaatcaatattcttagctagcttgattctttgaggaagctccccgtggctactcatgctgattatcttcacagccaacataaggtgattcatggtgtacggtggtgatctatttttaatgttcctttgcgtaggaaattcatcatgtgactaatagcagaactttggctgctgcattgttcatgccaatttgtgtgcactaaaatatggatgtcataatatctgactcaatatatggtttgtgccaatttggtgtttcattgcaataggactttgggagcatttacacttggattgaatgataattatggaacgcaatgtcatcatctctaacgcactagatatgggtggtttctatatgctgtgggatgcaggggttctggtgtggaataattttttatcaattgaagtaattttgtcccaaaacttaaacactccttgtgcttggatattgttctgtctgttattaataaaaatgtagccttttcaaacaagggagcagagagttcaatcgcatttcaattaaacattatatggcaagcagagattaacttttgacacctgcaacttgtgtttattaaaaatgatttatgataaaataaaatggcgtcatttcatacaagtagttgactccacccaggctcccagttaaaataaaaacttgattgttgttgactaagcattcaaagaaacagaaaacaaagggcaagaataagaattcaactttactcgccacaaaactacaaaataaaactgtagtctaattgcacctgcaacatgatatttcagccttctcagccaccatcttttattgcacgtttggggcctaattatagtcaaaaatataaatttccaagaattgtatccaatataagataatgatatgatttgtgctacaaagatgacacgctagagaaagaaacataagaacgaatactacaattcatgtaataaaacagaaccattgagtcattaattccatcaaactcactagggtactttacaaatgtcctcatattccacagctttaagtactctgccatcataggctcctttctcaatctgcaccttagcacaaaaattatctgtatccacccccaacagcttagcaattgatcctcgatatgcaccattgactatttttacacgccccccaacttgtggaatcacagtttcaagctcagcctgatcaactctgagaacatgcttgctttcaagcatttctatttccccaacatacttgtcaattaccttccggacaacgcccttttgcttgtagtaccccttttctgccaagactttgctcataatcttgacaacaattccctcatgcaaccaataatccttccgattaatttcttcctttttcttctcttcttccctcatcatttcatccaaagcagattttccacctccactttctttcctcttcaaattgtttctgggattcctttcattatatttctcttcatcaccctcatcaaacaccacccttgacgcctcatgtttttccttgaccacaggtttagctgatgatgacccaagagaaaatcctatcttgattccatcttccatattcagttccctcagaggctcaacctgtgaaggctgatcagcctcagaattagttggctgcatcatctgctcagccttttcaatctgtctcctgatctccttctcttgcttttcttcatctaccatatctgccttgattctcttattcttcatcctctccttgaaaagggtttctgaatctctatctatatatgtaatgaaccatcccttgggtgtttcctcaaccttacatttgccagttcgacccaagtacttaacaaactcagtaagcgtagcccactgagtggagttcatatgaacgtggtgtctatcatttatgtattcgttataaactacagtggctgccacacggctgaatcggtgactgcgcttcatgtgctccagaaaggtggtctcaaactcttcggaatagccctcaactatccggtgtgggttttgtccaaaaatctgcatttgacgctggtgcccttcactcatgcaatggcatttaaacccattctcatctcggcactgcttctgacacatctggcaataccaccgaagcttctgcaatccttttgctttgattcggttggcaattgctttaggtgtgagaaactcattttttcccatcacgaatctggatgtcacatttcagatcaaacaaaactttatcagtaatcctacacactgtttccttacagctgaaattacgttataaagcaaaaaagaacacaacaaaaacagcattagaacaaaagctaaaattcttaaagcattagaaaacaagaagcagagtactttggagcaagcatccaagttaaataactaatgaataaagttttgattagtatacaataaacaacttcactttttcgctcacacgttaattgaaatccttcaaggtcgaagttcatcatcaattggcaaagattcccagaggaacccaatgattaaaacaactttattttgattctcaacacgatgcaacaataaatcaatggtttttcaagcattctctgttccaacatctttggctcggtatcctattctagtttgcttacatctcaatttcttgaaacacacttctatccttctcggtctttcaatcaaagcattaccaacgaagaatatcaatcatccaatcaatatacaaacaacgaggagagagatagatagatagatagatagatagatagatagatagagagagagagagagagagagagagagagagagagagagagagagagaacgaacctgaaattggcggcaactattccggtggtggcgttcgcggtggttcacggtggtagcggcaactacaattgtaggaaccctagatttgaagacggagagaaactaagaaagcgattgggatcggaaagggttttgtttttccgttcacgccgtgcttaattataaactagcttggtggaacgccatttataaaaaaataaaaatatattttaatcactcttgttgtaaaaaaagttgtattgattaattaactaaatagcattttaagtaatattgataacttaaaacaagtaatatttattgacttgaaaattataataaataatatgatatggcaatctgtaattggttggcaacacaagcaaaattttaattatattataagtgtattttaattaattaattttttagaggatttaagtaattaattttaatatagtattgattgatatagacgttagtcaatcaaataaaatcctatgactttaaaaatactaatcagacaaataaaccgttttcgattatatggcgatttataatttattgacaacataataaattttacatttttattggctccaattaaatatgcatacataaaattgtcataaaatatatataaatctatcacttaaaaaaatagtaatgttaggctcataatttaatttatttgcaatttaagtcttgcttttaatcctcatagttttggttaaaaatttcttaacccaggaattgccacgaatactgcaaatttagggggtatattttctgtgtggatatctagttagaattcaattatcttagggtttgtttgatttggaaaaaaaatgtggtattggatgggataattttttatgatttattactcgatacaaactacttaaaagatcaaaatatctattttttattctattttttctatcttctagatatattagaatgtcaacatcaccgatttttaataatccaccgagttcctggttaatcttcctattacatttgcgtctccacaatatatatagttatatacaaactaagaaaaacaaagcgcaaataactgcagaaaataaaaaataaaatgatccagaaacattagcaaagtcataattatgtaatattaacccaaatgatataggggggtcttgtcctacactcaaatcagaacgctgtctatgcaatccggcatttttcacctgaaaatctacacagccgacttatatgtctaatgctcaggttttagtagaataactccctccaatacataaagttgttcttctaacattacacattctcatcaagacatcagaaaaacaatccctaagaagagagtgattcaagacaatcagttcctaagtacaagctggatattgaattgcgtgcaagaagctcggagtccatatcttcagattaacagtaagaaacctgccacaataatttgaagttctctattactataagcaagcagaattcagtcagtctcaatcaagagcaaccacgataattttcaaataatcagtgaatgtgctaaaagaatgcagtccaacaatgacaaaggtaaaagatttcacaagtgagacagaatacacaggaaatgatggagaaaagccatataaatcccttgttaagaatcttacataattctactatgttaagtttaatatggaatgcaaaaaattgatgtttcgaagctaaataatattagagcagttaaaattcaagtcatagaatgagacaagaatgggacacaaatacagaccacaatgagacaataaccacaaaaaacaataggaaaatatatatttcatagatcaaatagaagaccaaatataatcaccatatattttagacaatagaccactaacatctaaaatgctgggtacagaagcaatgtcctcaaccatgctaaatcattagttaaaataaaatgaatatataaattggacagtaattaagatgtcaacagtaatggatacattgattcagtgaaaagtaatttgaacatgatagaaatggttgtcaaactcacaagtcaagaaaaccagttgagttacattgtttttttaagaagaatttattagacgtgcataaattcactagttcatgagggaatctgacaatccacaagcttgagtcatgtaatttctcgccaaaaggcagtctagtgagtaacattgggtagacatgtataaattcacaagtccaagagcctgaaaatctactgtcctgtgacatctatttttcccaaaacacagtattttgaaacatacagttcacggctcatcaattaccatgatgcaaatcaagcaacactgttgctactgaaactaggatgaacactcttgaaaataggactgatctagggtggagacatggggcatatattcagggcaatggcaaaaaaagtcggaactatgaatgtttattatggtgatgctattaaattatttttggatactatgaatctatgataggctttttttatgaagtaaactcttatcagttcaaatatcaagtcaatggatgttccaagactataaaatagactcttatatatgactataacatgatttttacatagactcttgagtttgacaacattaagaataggcagttctctaaagaacatagttgtcaatcccaaatattggctgagaggcagaccctgaaaatactatagctgaactgcaggatggcttttattctaaccaattagaataaaaagattaaaggataaactttgaggagagttagaatacaagataatacctgttttagagggaatgaaaaacagaacatatgaacagaacaaagcaaggcagcaaaggtcacatttcgctggaaacagtaacaggtttgcattaaatggccgcataattctcagggatgatcataaactatggagagcagaggctgcagatgttggggatggccaactgtcacaactggacagaaaatgctgagaaatactggatatgttcccagaaaaggatgggtgtttggcagcgccaaggccgccatggcggaatggcatggtggttcttttttttttttttgccaaccaccatagacaacaatgtgaagggaagcccactatggcagcaccatagggtgcaatggcatgtttatgtagcagaaatttggatttcagccatccacaattgataacactgactgcagagctattcaatttttgtaaaatgctccagccacaacactttgcaagcacgggatagcaacactatttggcactattgacaactatgctaaagcatgctcctttacaaaggtaaagggaacagaaagaattacacatttgccttaccaccatttggatcagttagcatttaatttccttggttagagtttgaaaatagcttatactagtttgcagggaagttatctttccttgatgatttaccaacaggaataacaataaaacaccaagaaagccagcttggcacttatctggccacaaataaagatgatggaaaggcaaaagggtgggaacgtatgtgtatacacacacatataatatacatatatatcttctcttaaaacagtatataaaaaggtaaattccaaaattgtttatagcaaacagcatactataattttactctgcaactcaaaagtcacaatcatgtcgaattatcgatagcgatcctaatgagtctagaaacttgactaaaaggtattgatgttaaattttgcttcatgcccaaacataaatttgagttggtattattaatagccacccacccggctccaacacccttacaaataaaaacaaaggagagatttatgataacaaaatcagtttttccttgcaaaatgcatgatctcatcttaatcctaatttaccatttaattttccttctagacatcactatctctcacacaaaaaggaagagtgcaagatacacataaaacatagaatgtgtgtctggatgctcagtggatggtaaacaaattgattccgcctcttgtcaaccatggttttagaaaagatacaaatttggtcattgtaggactataggtgataaaaaataaacttgaaatttaagtcgcaaagtcaaagttaatttgagatgtccatggccacaattggcagcacttgtccacaaattccaacaatatcaaggaatgcgatggcagcagcaatttaaaacattgatgttgaaaaatttaaactaaattttacatcaaactagctattatagtaaaatcaatcaaacataaataacttaaaaatcaattttacaaacgcacactcaaacactcacacacatacactcactgactcactcaattctgcaaacacacactcaaacacataaacagaggattgagcaaaacaataaatacaaacctaccaatcatctctcccattactgttgctgttgatttggagggtttggcggagggggcatgccagggcgaggaggaccaaacaccggaacaccgctgccaggtggcggtggcatgccagggcgaggtggtggtggagccggcattccggggcgagggggagccggaggtcctctcaccatctgtccaggagggggaggccccatgggtctctgtccatactgcggtggaacttggaactgtggcggagggccaccaggtctctgcggtgcaaattgcccaggcggcatcggcggtggcggacccctcgccatgggaggaggagcgaattgccccggcatctgccccggaggcctcatcacaggcggtccaccgccgggatacgacaccggaggtgcgttgagctgcggcgggcgcgagatctgcggctgcatcatgccaggggcggggccgccgacaccgcggacagggccggcaaggcctggctgagcctggacgacgggagcgggtgggatacctcttccggcggcgcggccaataccagggccggcgagagcggcggcgccgactgccttggagcgggactcctccggcggaggagggccctcgacggtcatggagatgacctcctcgccgcggaggaggacgaggccgagcgtacggcggtcctcgcggtcgccgccttcggctggcttcttgcccttgggcggaggaagcttgcggaactcctcgcaatcgccgaggacgaggttcatgtggcggtcgaaggccatgaattttcctacgagctggcgaccgtcctgaatggtgacacgcatacggtagttgatgtactgaagcatcttggaactcttcgacatcgacattttgtaaaaatggaaattctcttctgccgcagcttcttcagtgagagtgttttagggtttaagaaaaattgggaccttagaggagggaaaatattgttcactccatacactcgtttcgattaacccaaccaactctcttttatatagtgcaagatccaattaagtcgggccaaggcccagagtccaaaagtgattttttttttttttttttatatatataaaacaaaggagtcttttcatttacactagcataaaaattatgattagataagaaagatattaattagaggataattgtgattaaataaagaaaattatttttttacttgtttatatttcttttgttgataaattatattttaacacaaattgaataccagtgtagggagttttcctttatagattaaatttgaatgaagataaatagagtatgcatggtctttttatattttatttttctcatccatttgtgattattttatatttttttcttttttaggaagttattcattataattgtttttcagaaccctttcaaatataactttttatgtgcatgtttaggtctccggtaggagattccaaacctaggtttgtaaatataattcctctaatactattggactcaacttacgtttgaggggcttccaccagtttcccaaacatgctttttatcttcattatttatgaatgtgctattagttggagagcaatgctttaacttattcttgttttgtctaccaaaaaagtgaagtatatatgtcattaacaacaggagttgaagaagatacgttaatcactggaatttgattttcgatttggacattattgaatcataattaaaaatattattttatcctaatatggtctaagctgggaggaggagagttagatgagtattaaataagaagtctcgaatacctgtttgtcacacaaaaaatgtatgaaattataagatcttattcatgatttgggtttgaatatgtaaatacatattttttattgagatattcaaagtgcattgactttagctaaaaaatcaacctatgatgctgagtgaatttcgtgagtgtatgtaatttgttttccataaagaaataggcacaacagtcaatccaattgatatgttgactaagactttgtttactaatcaaaagttcaagcatgtcttggatttggtaaatgatcgtataattcaagacccttcagggttagttgagaggatagtatttttggttagtgacgatttgatgtgtttgtatataacataagactatttatatgttatttgtgcaaaattatatagttttatattttgtctccctttgagtgtaggttacgttgatcgaaccaacataaaatcctcatctctctctctctctctctctctctctctctcnnnnnnnnnnnnnnnnnnnnnnnnnnnnnnnnnnnnnnnnnnnnnnnnnnnnnnnnnnnnnnnnnnnnnnnnnnnnnnnnnnnnnnnnnnnnnnnnnnnnnnnnnnnnnnnnnnnnnnnnnnnnnnnnnnnnnnnnnnnnnnnnnnnnnnnnnnnnnnnnnnnnnnnnnnnnnnnnnnnnnnnnnnnnnnnnnnnnnnnnnnnnnnnnnnnnnnnnnnnnnnnnnnnnnnnnnnnnnnnnnnnnnnnnnnnnnnnnnnnnnnnnnnnnnnnnnnnnnnnnnnnnnnnnnnnnnnnnnnnnnnnnnnnnnnnnnnnnnnnnnnnnnnnnnnnnnnnnnnnnnnnnnnnnnnnnnnnnnnnnnnnnnnnnnnnnnnnnnnnnnnnnnnnnnnnnnnnnnnnnnnnnnnnnnnnnnnnnnnnnnnnnnnnnnnnnnnnnnnnnnnnnnnnnnnnnnnnnnnnnnnnnnnnnnnnnnnnnnnnnnnnnnnnnnnnnnnnnnnnnnnnnnnnnnnnnnnnnnnnnnnnnnnnnnnnnnnnnnnnnnnnnnnnnnnnnnnnnnnnnnnnnnnnnnnnnnnnnnnnnnnnnnnnnnnnnnnnnnnnnnnnnnnnnnnnnnnnnnnnnnnnnnnnnnnnnnnnnnnnnnnnnnnnnnnnnnnnnnnnnnnnnnnnnnnnnnnnnnnnnnnnnnnnnnnnnnnnnnnnnnnnnnnnnnnnnnnnnnnnnnnnnnnnnnnnnnnnnnnnnnnnnnnnnnnnnnnnnnnnnnnnnnnnnnnnnnnnnnnnnnnnnnnnnnnnnnnnnnnnnnnnnnnnnnnnnnnnnnnnnnnnnnnnnnnnnnnnnnnnnnnnnnnnnnnnnnnnnnnnnnnnnnnnnnnnnnnnnnnnnnnnnnnnnnnnnnnnnnnnnnnnnnnnnnnnnnnnnnnnnnnnnnnnnnnnnnnnnnnnnnnnnnnnnnnnnnnnnnnnnnnnnnnnnnnnnnnnnnnnnnnnnnnnnnnnnnnnnnnnnnnnnnnnnnnnnnnnnnnnnnnnnnnnnnnnnnnnnnnnnnnnnnnnnnnnnnnnnnnnnnnnnnnnnnnnnnnnnnnnnnnnnnnnnnnnnnnnnnnnnnnnnnnnnnnnnnnnnnnnnnnnnnnnnnnnnnnnnnnnnnnnnnnnnnnnnnnnnnnnnnnnnnnnnnnnnnnnnnnnnnnnnnnnnnnnnnnnnnnnnnnnnnnnnnnnnnnnnnnnnnnnnnnnnnnnnnnnnnnnnnnnnnnnnnnnnnnnnnnnnnnnnnnnnnnnnnnnnnnnnnnnnnnnnnnnnnnnnnnnnnnnnnnnnnnnnnntatcttattatatttcatcctatttttgctcatttttgttaaaataacgatgcatagatattttatgttatttgataagagagaaaaaataggagaattaattttagatataatgataatatgaaatatgatatatacaaagaaagacttcattattattttcgtctctcaacttggggattaaaatattttagtcttctaaatttctttttaatctttcaattttgaaaactgccatttttaatccttttcatgattatgataattttaaaatgcaaactttggtagcttaaaattaaaaatcaaattatggaacctaaaaatcatcacaaattatcgatctattattctcaccctggcaagagactaaaacgaaatttaaattaaaaaaataaaaccctaaattagggagttaaaactgtaattatgcgtaaaataaataaaggaaaataagaagcatcaaactatataattaatgaacatatctgcatattactttttctaagaaagtcgacatatcacatatttcaattaagaagtaaatatttttaaatatgctgtaagtattgaatttactctttcaccattttgatggggagcagcaaaacctgtatctgcgattctccctctaccacttcaccaagcccactgtttttatcatctaatttcaggttttattggattaaattttttaaatattattttagtataaaaaataataagaaatgatgacggttggataaaaaaataaaattaatataattttttaatagttatattgattttagttttatattctcttatattagcatcttcttattttcacttttgaatttaaaagtagatttaaaattatactttgatttttttatttttgtagaaatattaaaattattttatgataaatttaatgatatatttaaatgggataaataataaaaatatactataagagagtagtgagggtgaaaattgataagagaattattaagttacgtggatgatgaaattaaagacataattacaaaaatattaagttaaacaagtgatgaatatagtatggtaatttaattagaaaacaaaggaaaaaatgcaagacataagaatataattgacattttttttattccaaaataataagagagacatatgatacatacatcttgaaaaatattaaacagaaaaaaaaatatatgtgatgagaaaaaagaaaatatgttaatcaatacaaaaagaaagaaaaaaatctaacaaaattttaaaaatttagatgaaattatttgataaataatttatattaaaaagtatgatgaaattcaccaaatcttaaaaaataatctattaaaattttgatagtattatatactaaaaattataataatatttgttaaaattttaaaaaataatctatcaaaattttatgaattttttaataattttttatataaattataaaaaattataattaaataacaccattttttttaaatcttaactatcttaattgaatactaaaaagtttatttatagtatttaaaaatatttaaaaaacctgattcaatatatcccttcgtctcagcatctctcaaaacagattcctagtcatcgatccttaaaaagtttaccatatcttttctatttttatgcttgatcttttctaaattaaggtaacaacctagtaagtttatcggattctgccgcagtaaattcgatttgcgctaaactaagcatctgaggatctcagaggggcatcacattcacattgagccaaatcatcacagcgacattctcaaatcacataaaaaaaatagtgctcagtccgtgagagttcgtatcacggctctgacactgacacattcgcacgggatccctactttcttctctcgtttttttattctcccatcaattatttagcaacccattaaggttctcgtcagaaagtttacatttttattgttagtttttaaatatatttttcatcgtttcatcagtgtgatcacacaccatgatttgcaccgtgaaacaacccgccatatccatcagaggttctgatcttttcctgcgtaaaaagtgttcagcttcaaccccagttcagtcatgttcccttgtttcaccttcttcaagggaaaaaaactctctgagatcattggtgtcagtgcaaaagccactgcacctttctcgtgttggttttggagatttcgttgggtctctggtgaggcgtgagcgtgctgatttcgtgacatgtgaggcttatgaggctgatagatcagaggttggaggggctggcgctccatcagaggctgctaagaaggtgaagattgggatatactttgcaacatggtgggcactgaatgtggtgttcaacatttataacaagaaggtgctgaatgcattcccatacccttggcttacctcaactctctcccttgcatgtggctctctcataatgttgttctgttgggccaccaagatagttgagcctcctaagactgatcttcagttctggaagaatttgttccctgtaagtgactcacttttgtttgtttcctcaggataaatttgatgggagaaaatgaaagcatgcttttttgtttgttcatttgttataatttacgtgtacttgttctggggaaaacatttttttttaagaattattttgtcccatgttttgatatatgtgtgtgtgtgtgtggtttgacttcagggaagcttgacgatttcatgaaaaagagaaagagaaaatttaattcatttaaactatgttgatgaatgggaggaggtttacaagagagatttttttttttaatgatggaaatttaagttttggaaaggttttagaaaattgtttgtgactgtgattttggccgcaatgtcaaggcttttgtggcctttgtggctgcaattcgccgcaatatcaaagatcctgatgaaacctagaccgcgtctgtgaccgcaatttaattaagaacttgaatcgttttggcttttccccctatttatttatttgtttattaacatcttgatatggattgggaccttagtgtttgctgttttcccccgcaggttgctgttttacatacaataggacatgtagcggcaactgttagcatgtcaaaagttgccgtatcattcacccatattattaagagtgctgagcctgctttcagtgtaatggtttccagactacttggcgaggaattcccagcgccagtctacctgtctttgattccaatcatcggtggatgtgctcttgcagctgtgactgagctcaatttcaatatgattggtaaagaagttgcttttctatcaaaaaaatgatctgttatctaattttgttctattttgtatattgttgttgagcatagtataaaagttggatatgagaagataatctgacttgaactaaaaaatttgacccgagagaagaaaatttgatggcaagttattgattaaggcaatgtcataatccctttccccttcctccacaagcaaagtgattattactggaattctatttatatatttatttaattattatgtgttcatgcttgtgttgagccaccaacggaatggatgatttactattatataagattcttgggtgtttatgccattagcagaggttatgatggaatgtacataacttttcatcttttctgcataggagtccttcacaccctcctgattttgatttcattactgttttattatatttttcaggttttatgggggctatgatatcgaatttggcatttgtactccgtaatatctattcgaaaaagggcatgaagggaaaggatattagtggaatgaattactatggttgtttatctatgttgtcccttgtaattctcacaccatttgcgattgctgtggagggaccacagatgtgggcagctggatggcaaacagcactctctcaaattggaccccaaataatatggtaattacaaaatgtctactctatctgatgttatcaatgctatgtttctgtaaaggtgatatcttgaaattatcataaattcataatatttttttcctacaattattatagacatcttgtgtccttttcagaaattcaaatttattggatgttgggcaaattattagttacatttgtttttgtaatgtgtacactatctcagagcaggagaaggtaaggtggaggtggttggattgtttatggagttgctatgtagttattagaaattagagcaaatctttttcgtataactagtcatagacgatcaacattaaaagctgcttaaaagtagcatgactaaaaagtcgcatgatttttgttttaaatcttaattgttcttggttatttttagaaatgcaaacatttcattataaaaatttgattttaaattttcagttcaaattgtttatttaattgtaaatctcacgtgattttttcctttttaatcaaagatcaagtgagattggaaattaaatatgcaattaacagttaatgtcaatctaacagttgtaatccaatgttttcatttctcacaaaaattaagagttctcaccttcacatacacatatgctgctgaccgtgaagctggtgtgaaacctgatttatgtgtttggattttcaaacaggaaattgacctgagttcttttgtttttgattttgagttatctaatattcttgtcctttcacttgtggttctgaaaatcttctgcattgttttgtcttatgattaaacatatggctgctacttgtgcacaacaggtgggtggcagctcagagcatattttatcatctgtacaatcaagtgtcatacatgtctctggatgagatctctcccttgacatttagcattggaaacaccatgaaacgtatatctgttatagtttcttcaatcattatcttccacacgccagttcagcctattaatgctctaggagctgctattgccatcttcggaaccttcttgtattcacaggtattatctagatgagaattttctatagtgatattttattgttaattattgcgccccttggccatatcatgcactaaatgaaccatatacatgctcatactcttacttcttattggttggagccttggaggatccttttcaaaggttgtattaggttggttttggaggctagcttcaggggtgacatagattgtgttgttagacattgggtgattaggtggaggaacctacactgtcaaatactagtgtgcaaactgtcttgggattatacttcaaaagatatttggtggaacaatttgattttgtaagtacacaagaaggaaaaatttgagatttatagtcataggttagaattgagtgatggagctattctaaattaggtgatctgatttttatttagtagcttcactttgaattgccacctatgacctaaactactattggtttgaatccaccatactgtttattccttttctaaatctattttattacgaattagcatatcaaagcttcaaaagttgactgcaccaatccatttgttcacatgttaagtgtccttttacatatagtttgttgtggagggccttgaaatatcaagaaaaagattggtggtaagaaagtaagaaacagagtactgactatgtggattgcttataatgtggttttcttttgaaaacaacaattttagttgcaggtatatatacacaatctctcattctacttattttttgcaggcaaatcagtagggttgaggagttcagaattatccccgaacttctttacatgtggtcatacaaggtcaccgataaggaagttagttttggaatgtggtagctggattatggtaaagactggatgatccggctgtctgcctaattgtacataataattaataatgatgacaccgctgtggaacattattattagagattattagttttttgcccccctctatttctgaattatcattaagcttgaggaataaacgtctgtatttgtttggtctgaggataatttctcaagacatggcatattataataaggttttcttaataataatcaaagtacggtgatcttgtttataatggtcgttatgattcccattaatgcttgctaacactagtgaagatgctggctggagttttaatttatatttttgggtcattcttgctttaaattagcctttgattagcagatggaggcccagttaactgcccctatcgtgtccgtgattatacttctattctattttttttttttaccgacaaatgttattcgttagtttttgttagtgagcgaattcgaatttataacatcttttttccttttttctttaatcatcaaattaaccttataattcttaaaactgccctacttaattcatgcacgtgtcatttgttagagagatctctctaggccatctaataataattggatttcggtcaattttttgagaattaacgaagaaacataatctaatgtatttataatatttttaatggcttgaagattgttcacctcacctcacaccatcagacaatttatgagaatcattactttggggtgggtgattcttgtatgtagctttggtttttgctgtgtctcaatttatgagaatataaagttgtatcacgagcttatgaaattttgagtgagaaatatgccactgacaaatagattagtaatatgagactaagctccaatatgggtcgtgatcagaatttggggatggtagattttgtatacgtactactagaaggtgaagtaatgggaagagcatatatactaacagaaacacttttagtctagttcacaatagaagtgaagtatatcatttttttgtgttgatacgaagtatctatttcatcttcaagtgactatcttgttttaatttttagatgtttagttttatagaaaaaagttatttgaaaaataaacctcattattttatctcatttaaaaaatgaacttcatttcctaaacgaccttttatgcttactgatgaaatacttcaattttaggagatcttgtttcaaatgataatactttctctattttgaaagtcatatgattcatatcgcaataatataaggttgttaaaaataaaatctaaattaattaaagaatattttagaaagaataccattaaatatagtgaaattaattaagattaatttgtttatattttggatcaccacacttaagtttagatttacttatcgttgaatctagatagtagcataaaagtttgagcgtccatgtctatatggtcactacaactaacaagttccatttgaaagaatcactcttatgtatgctgtgaacctgataaatgtaaacccaaaaatgagatggcatgaggtggaaggaagagacagaaataaagaaaaaagagagagataaagtgctagatgtgatgaaaaatagagataaaactaaaatgaaaaagagatgtatgaaaaagaaagtgtgtaaattgaatattttcctatatgctatttctaggcatgggtgtttcattttgtcaaatcacttgtatttactacatgtttgataggaaaatacataagatacactcatttaagccttgagtctttgaagctatatatattcatgtagttttattgagactaaagtgtttaattctcgtgcactcaaacaagtttctttgggttggatggaagtgagactcagtgctattaaggctttgctttccaattgtaacatgctggagagtttgaattttaaaaggtgttggaattcagacaagtttgacctaggtaaagaaaaacacatggatctgacaaagctcgtcctggactaataatgcggctttgattttgattatttcaaagtcaactaatgaaacaaatctcaaaattttcaagtattgcgggtggatgaactttgacctcatagaaattgattcactcgcaatggaagagatagattttgatttctctgtagaatattcatttgaaggatttcgttatcctaactacagtttggtggaagatgtttgtactgctaaagttttgactgtatgtagttttgtgcttcagatataaattcttcatcaccttttctctccctcataataaatttgtcaattgttatcatatattagtactagttttataattatatataagtgtatagttacccttatagtccatgataactttcactcttttgacatgctccacttctgtttggatgaactgaaatatggattaattacaatatcttatctaaattgttttaattaacgtattgtgtgtgatattttaaggtgattcctactggtcccgaacgtatggaacctgacatggatgtacatgtgatcatgaagatggccttgcaacatataataagtttattggaatctcattcttcctcaaaagttgtcctatgttagagcgtctcaccactgaactaggttcaataaatgacctgtttgtgagtatcaactacgtaaattgaatttgtttttcctatatacatatgtgtgtgttaaattttgaatttgcttttaacacatctatatatgttgtggttattttctattaacaaaaaaggagtctaatttttattagaatgtggattttggtgcatggataacatggtggatggccagttaatggatctaggataggttctgataccatattagaatgtggattttgacttaactcaaccccaaaagctagctcataaggtgaggattgttctccacttatatactctgacttggcactatctctagtcgatgtgggacttgagttatttccaataatttttgctctatattgtagaattatgaaccaccgttttattttaacagcacacaattctggattgaatatttggatgtttgtgaatgattgagttcaagttgagaagtggtggaaattaatggctttagaggaactctaaatgaacacctcttgctcaagtatttgatctttcgtggatttgtcttgaaaaagagtagcatataaacatgttgaaggatgattgcggtaagactgtggagtctgattgccgtcaaatggcagaacttctgttgacatgtccaagggcttcaagaaacttagagatatcaatcttttaatagatagttttgaagaaagtgttgaatcaatatataatgtcttgaaaaagtactctatctttaatattattttatagaaccttcaactttttattcacaaaaaaacaacttaccatgttatatgtttaagttctaaatcctggtctttgttgttatgcatttttagtttgcaaacgttacttattaatacaagacatttgtctatattatataaacgcattttatttagatttcacagatttcattagatgcatatatatatgttatttgttatttaaaaaattcactttacaataatagcttttaattgtgtttcagcttaagattttccattcttttaaggctaaaatttagtatttatgtgcattctaatatcaatatcaagcgtggatattgacagatacaatctaaaagctatgcagatttatgttatgtagtattttatcaaaaggacaaagaatcatgaagacagaatccaagtttgttgcttttatggcaagagaaataataattttatttttttctctttttattgagatagtgtaatctaaaacaaaattgatatactaacttggtagaatttgaaaagtgtttttaacttggggtaagtcagggagcaagtggtacttctcatctatggcttactttttttaaatttaaattatagtaaaaactttataattagtatgctactaattataatatatatatcaagtcttagacatttttaggattaattttatttttgatacattagatatatcatgatttagtgattttggactctgaaggcacagttgcgtgaattgaatcttttaaatgtcacaattaattatgcatttttagtattttttttcatacttttttaaatatttaataaatttttcttatgtgacactaaataagaacatgttgatgaagtgacatttaacatgttatttaaaaaacaaattgacatgtcttaattatatttctagtattttatgtatcataattataagtgattaaaagtgtaattatgtcatatcagtcatatagaagttattgatttaatttacattccaaaatatttcttaagattttaatttgtgttaagtttcaaaattctaaattaaaatgatatatatgttaaattatttttcaaatgatattaaattcttaaatttaatttaaataaattatttttaccatataaaaatagtattattaaaaaataatatagaagtttttaaatattttatcttttataactaatccagattttttaattaatattatnnnnnnnnnnnnnnnnnnnnnnnnnnnnnnnnnnnnnnnnnnnnnnnnnnnnnnnnnnnnnnnnnnnnnnnnnnnnnnnnnnnnnnnnnnnnnnnnnnnnnnnnnnnnnnnnnnnnnnnnnnnnnnnnnnnnnnnnnnnnnnnnnnnnnnnnnnnnnnnnnnnnnnnnnnnnnnnnnnnnnnnnnnnnnnnnnnnnnnnnnnnnnnnnnnnnnnnnnnnnnnnnnnnnnnnnnnnnnnnnnnnnnnnnnnnnnnnnnnnnnnnnnnnnnnnnnnnnnnnnnnnnnnnnnnnnnnnnnnnnnnnnnnnnnnnnnnnnnnnnnnnnnnnnnnnnnnnnnnnnnnnnnnnnnnnnnnnnnnnnnnnnnnnnnnnnnnnnnnnnnnnnnnnnnnnnnnnnnnnnnnnnnnnnnnnnnnnnnnnnnnnnnnnnnnnnnnnnnnnnnnnnnnnnnnnnnnnnnnnnnnnnnnnnnnnnnnnnnnnnnnnnnnnnnnnnnnnnnnnnnnnnnnnnnnnnnnnnnnnnnnnnnnnnnnnnnnnnnnnnnnnnnnnnnnnnnnnnnnnnnnnnnnnnnnnnnnnnnnnnnnnnnnnnnnnnnnnnnnnnnnnnnnnnnnnnnnnnnnnnnnnnnnnnnnnnnnnnnnnnnnnnnnnnnnnnnnnnnnnnnnnnnnnnnnnnnnnnnnnnnnnnnnnnnnnnnnnnnnnnnnnnnnnnnnnnnnnnnnnnnnnnnnnnnnnnnnnnnnnnnnnnnnnnnnnnnnnnnnnnnnnnnnnnnnnnnnnnnnnnnnnnnnnnnnnnnnnnnnnnnnnnnnnnnnnnnnnnnnnnnnnnnnnnnnnnnnnnnnnnnnnnnnnnnnnnnnnnnnnnnnnnnnnnnnnnnnnnnnnnnnnnnnnnnnnnnnnnnnnnnnnnnnnnnnnnnnnnnnnnnnnnnnnnnnnnnnnnnnnnnnnnnnnnnnnnnnnnnnnnnnnnnnnnnnnnnnnnnnnnnnnnnnnnnnnnnnnnnnnnnnnnnnnnnnnnnnnnnnnnnnnnnnnnnnnnnnnnnnnnnnnnnnnnnnnnnnnnnnnnnnnnnnnnnnnnnnnnnnnnnnnnnnnnnnnnnnnnnnnnnnnnnnnnnnnnnnnnnnnnnnnnnnnnnnnnnnnnnnnnnnnnnnnnnnnnnnnnnnnnnnnnnnnnnnnnnnnnnnnnnnnnnnnnnnnnnnnnnnnnnnnnnnnnnnnnnnnnnnnnnnnnnnnnnnnnnnnnnnnnnnnnnnnnnnnnnnnnnnnnnnnnnnnnnnnnnnnnnnnnnnnnnnnnnnnnnnnnnnnnnnnnnnnnnnnnnnnnnnnnnnnnnnnnnnnnnnnnnnnnnnnnnnnnnnnnnnnnnnnnnnnnnnnnnnnnnnnnnnnnnnnnnnnnnnnnnnnnnnnnnnnnnnnnnnnnnnnnnnnnnnnnnnnnnnnnnnnnnnnnnnnnnnnnnnnnnnnnnnnnnnnnnnnnnnnnnnnnnnnnnnnnnnnnnnnnnnnnnnnnnnnnnnnnnnnnnnnnnnnnnnnnnnnnnnnnnnnnnnnnnaaaaaaaaaaaacacaaatgaagaaaacaatcccattaaaattttatgcattttcaccaaaggttggtttcattctaaatccaacagtaatatattatagtaattaattaatatatatatttatgttttcctaaaaaaaattctaataacggccggcaacgtatacatggaatttacagaaaagaaaaaaaaaatacaaaaatccatatagaagtatgcaacattgttttctcactgaagcaacgtctgttgcatatataaggtagcactcatggccatttcacacacacatttcaatcccattggaatatttgaagaaaaattcagtaccctaatagtcttctccacatctttattatcaatcaccatatcatatagctagaaccatggcaatgagcatctattcgttgccaatggaattgcttataactatcgtttcacttcttcccttcaaggaagctgtgagaacttctatcctctcgaagaaatggttggagttgaacgtttgcaagttcacaaaaaacatagagtttgatgaactcttttttgttaaacctgatcaacctaatgaaacaagagaaatccaaagaaggacatttcttgacttcattaatttgtggattgaaaatcacaaaggaactttggtggagaagttctcttttaggttatcaaatcctagaaatggtggtgagatcattgatcaatgcgctgcttttgccacagagcgtggggtgaaggagttggaacttgactttgctgatccgaactggaatgaaaattattatggtaattatgacgaggcgcagtttcaattgccagcacgagtttaccagcttggtagccttgagtctttgaagctatattcttgtagttttgttgagactgaagtgcttaactttcatgcactcaaagaagtttctttgggttggatggaagtgagactcagtgctatcaaagctttgctttccaattgtaacatgctggtgagtttgagttttaaaagttgttggaactcagacaagtttgacctaggcgacgaaaaacataagggtcttagaaagcttgtcctggacaagtgccgctttgaatttgatgttttcaaagtgaacgcaccagatctaaaaaatttccagtactgtgggttaatgaactttttcatcacggaaattcattcgccctcaatggaagaggcaaatattgatttctctcaagaatatggcttcgaaggatttggtcatcctctttataatctggtggaaaatctatctattgttagagttttgactgtatgcagttttgttcttcaggtatacattcttcatcaccttttctctcttgaaattaatttcttaattgtacgttatcatatattattatatattctacttttataattataactttcagagttccactcttttgatcaatttgttccatttctttttcactgaattgaaatatctaattacaaaatgatttgttgatggtttcaattaacgttttttgtgtgtgatgcgataagattattcctaccggacccgaactgctaggttttcaaagtgacatgcttgtgcaacatttgatcttgaagacggctttggacaagaacgagtttttgggaatcacattcttcctcaacagttgcccgatgttagagtgtctcacgattgatctatgttccgaaaaagatttgtttgtgagtatcaatcacatacattgaatttgtttatcctttatatatattaggtttttgaatttgctttgcctatatgtgtggttttttcatttgaaaaaaagaaagctgctaattttttgttacatataatgtacttaggattatgaaacaccgtttctgtttaaccgcacgcgattctggagggacaacgtgggagtttatgcaagcttgagttcaagtctggaagtggtggagattaatgggttcagtggaactgagaatgaactttttgtgctcatgtatttcatcggtaatggagatatgttgaaaagggttagtataaacatgttgaaagatgattctggtaggaccatggaacctcaattccgtaaagatgcagaatttttgttgacagttccaagggcttcaagaaacttagagatatcaatctgttaataaattagtaataatattttaatttgagagtattgtgaatgtgtgactgggtgctacattaaatgttagcgtataaactctacaacaaagtcgatatgatgttataacatctctatgctaagagtttatttcactgatttcatcaagctgtgtattcatttttagatttcgtaagtttaattacatgagggtattgaatttggtggttacttaaaaatatgcaatttacatcagctttctatgacatagtacttgttttcttttcttaggaattgtgtattgggttcctattgaacacgggaggaaggctaactaaatgttcctttaattaatatatattactttgcgcatttctttctctttttaaagatgaaaataaatataannnnnnnnnnnnnnnnnnnnnnnnnnnnnnnnnnnnnnnnnnnnnnnnnnnnnnnnnnnnnnnnnnnnnnnnnnnnnnnnnnnnnnnnnnnnnnnnnnnnnnnnnnnnnnnnnnnnnnnnnnnnnnnnnnnnnnnnnnnnnnnnnnnnnnnnnnnnnnnnnnnnnnnnnnnnnnnnnnnnnnnnnnnnnnnnnnnnnnnnnnnnnnnnnnnnnnnnnnnnnnnnnnnnnnnnnnnnnnnnnnnnnnnnnnnnnnnnnnnnnnnnnnnnnnnnnnnnnnnnnnnnnnnnnnnnnnnnnnnnnnnnnnnnnnnnnnnnnnnnnnnnnnnnnnnnnnnnnnnnnnnnnnnnnnnnnnnnnnnnnnnnnnnnnnnnnnnnnnnnnnnnnnnnnnnnnnnnnnnnnnnnnnnnnnnnnnnnnnnnnnnnnnnnnnnnnnnnnnnnnnnnnnnnnnnnnnnnnnnnnnnnnnnnnnnnnnnnnnnnnnnnnnnnnnnnnnnnnnnnnnnnnnnnnnnnnnnnnnnnnnnnnnnnnnnnnnnnnnnnnnnnnnnnnnnnnnnnnnnnnnnnnnnnnnnnnnnnnnnnnnnnnnnnnnnnnnnnnnnnnnnnnnnnnnnnnnnnnnnnnnnnnnnnnnnnnnnnnnnnnnnnnnnnnnnnnnnnnnnnnnnnnnnnnnnnnnnnnnnnnnnnnnnnnnnnnnnnnnnnnnnnnnnnnnnnnnnnnnnnnnnnnnnnnnnnnnnnnnnnnnnnnnnnnnnnnnnnnnnnttttacaataaaaacattcaacataattgcatcactataaatcacattcaaaaatattacatcacttcaaaatcaagacaaatataaacaacacgttacacattcatctagattttactctttattcagttattctcactcgtaatactataatttcttagaaatattgaacaattataaaagaaaatgtgttagagagtaacattaaatgaataaaaaaatacatcataaaaaagttatatggaaatagaatttctcctttatcagggcatgtaaattaggtatctaggtggtgaatggtgataggtcccagccaatatatatgaaaaagttgacttgttttccttctttctcattctattttttattctcctttgtcctgctatatacatacgaatcagtgtgtaaagaacaatttagaagtcaattatgggttctccaactctcaaatttcgttccactgtccatggtaagttaaagagcttggccatgataaacttgaaaattttgttgacatttatgttgtgggttgcacttgaaaagaaaagggttgccttcatcacccttgcatatctccttgcctgtatttatgtgacgacgtaccaagttaaaatttgaaaaaccaaggaatgtgataaaaagttgtagtattagctttatttaaagtgaaagtagtgaactgtgaacacatcaatgatccgactttaatcaacatgtaagccccaaagttaatgttaaacgcggaaacatggaactttcataaatgacacatgctgaggttccaaataagactcctatttattactagaagaattattctttgttcccgagtcaataggtgaaaatgaccaaggcaagtaaagcagcccccatccatatatgtactatgattaatagaaattaagctaccaaaacctaatttgcagcagtaattattattatttcattcatttacctgtgttacaattgtccattgcacatctgggggaagtctaacaaaatcgtcaaacttggttcctattagaattggaattgcagtctgcaaattgaacaaattaaatgtcatcagaaatttcataaaaaatacgtcaaaatcttcaaaatttggatattatcagcctaaaacagaatatttagttatattaacaagccattttgatatattgaacaaatagtataccccggcaagtcaataatcagggttcatttctctgtccagtcttaatgaaaaaaattaatgtcactttcctgtggatactcaatccatttgcactgctacttcaaaatttctctcgtgttttacaaaaagagtttccatgccaaaagcctttggaaactacactttaacttaaacagtggcagacactttctgaaataaaatcaattcatgtaatagtactatatataagccctgcaaaattattttttacggtacctgattccactgtcttgcttcattataccatctaacaacactgcacgaacataacaaagtacaaaaaacgcaaatcatcattatttctaccattacgtttctaagaagtaagaaccctccaccgaactcatgacacagataatagtatctcttagcctacctatttagtgtacaacgactggtgagatcgaacataatcaaaatcgcaaccgcatctttacaagccatgggaatttgatccaaggaccttttatctcctacacacgtcacataatataaagtcaccgtcaataagtcaattaactcaaaccaacaaacccagaacactaaaaagaatgaaaactaaaaagcaaatgtaaaaactaaaaagtacacacagacaaaacagagaaaaataaagggaaagaaaggtaaagtttaagcaaagaacctgcaacatcccatattctaaacgaaatacgagctccttgaacagacaaagttttgtccattagattcaatccttccatctgtaagcttctcttttcttgctcattccccacatacttgatctgagaataggaattcacataaccacaagctagttaattagacccgttaaaataaaagactactacacttgaccaatttcaaaagaaatacataatatatgtagcgagaatctaatcacaaactttctcatatatagtaaatttgttaattctcatgataaacaagctaaagaattttataaaagtaattttttaatattacataaaaaaattgagtgctgagagtattctggttgagaattagatactaatctttggagacaaaaacagtctcttatatgcatagacctgaaattgaagcctgaatacaagcttaagattcctgtttatttgttaattatgtcataccatgttgataatgatgtaaaagtttttaaatttctagtacacacttgttaaattcttccaaaaacaaaaacaaaaaagaaatggtaaagttagaaacatgctgaccacaaaagtagtttttccaatatggcaatcacccaacaagctgatcttgaggttcaccaaatcggaatcggagtcatagccgccagtagtggttgcaacggaggagaagacgtcgtcaacggtggccaacggcgaagaagaggtgtcccggaggggtagtttctggtagtgagatggccttccggcgacagagcaaactagaagtctgttccaaatgaaacggaaaaagtggccaacgaaagatacccttttgaggacaccccaccggacttcgacatgaacgattttccggcacagctgagacatcttcctagtggtgtcgtgaatgatcttcttcgccatcgagcatggtttcttctcggtgaatattcacataacagatagatagttagtacctaatcttcttctttgtagttcttcttgttgcggtgcgtttggtatattagtctggtttctcggtcccactgtttaatataggggacagttgaccggtatttttcatttcggtttcctaaactctccgtattgccgccttcttggtttctgcgtagagatgggtaatatggtaaatgaacctgtagtagggggtgtgcaaaaacctattccttacaaaaaaaaaaaaaaaaatcgaaccaaatttattctaaactgttttaaccgattcaaaaatccaaatagtcaaattattataaataattggttcgaaaattaaattaattttaaaaattaattgtaaattgaattgattttgaatcagttttaaatcaattttaagaattgaactaattttgaacgatttttaggactgttttatttttatataaaaaaaattgatttaaatgaaaattggtttattaacaattaggttaaccgaacctctttagtacaataatatagttcttttttttaaaaaaataatttaggtgaaaattggtacgattacaactcgatcgatagtctgagtgttttcttgcacacccttaacctgtagttgtagtattatttatacaaatatatttctataaaagtaaaaaaagatatatttcattagcactcatttttttttatcacatcatatttttattatatcctttttttttctgttttctttcttccactcttagatgtcaaaaagtttcatggatgttcaagaatatttgtgttattttatctcaaacttatcccttctcttatcattttatttattgtacaagaaatcgaacaagagtgttatggagtgtggtatgagagaagtatatgtatctttctcaattgtcatgatgcattcggcatcttatggggtgtgtggtgttaagaatatataggataggaattgaaaaaccgagtgtgatgactgatgaggagttatctgctgtggagagggcgcatgatgtgaccacgtagtctaatttcttgtttaattcccgtgctttaaataataacatccatgactgaaagggtcggaaataattttattttgatatttcttgctgattattattagcattctagtattagtttgaaattgaattgaagacatgatgagaaattgagaatgattacatgtattaaaggattgaacgttagtgaatggtgacgttcttctcaaaataaaaaataataaaaatacgactgcactgtttaagagtttctaaatcagaggttcatacttaatattctaatcatatttgtcctttttgaaagaaaaaaaatataaaacataattatatctttaatttgaattaaatattttataagctaaatatatttgttgaatataaagaatattccaccccattagtacaatgtattatnnnnnnnnnnnnnnnnnnnnnnnnnnnnnnnnnnnnnnnnnnnnnnnnnnnnnnnnnnnnnnnnnnnnnnnnnnnnnnnnnnnnnnnnnnnnnnnnnnnnnnnnnnnnnnnnnnnnnnnnnnnnnnnnnnnnnnnnnnnnnnnnnnnnnnnnnnnnnnnnnnnnnnnnnnnnnnnnnnnnnnnnnnnnnnnnnnnnnnnnnnnnnnnnnnnnnnnnnnnnnnnnnnnnnnnnnnnnnncgtttgttatttagcatgttaataacacacaaatttttatttagcatgttagacacgtctaatgtatttgaagttaaacgcgcttttgaattagttttgctaaagtcaattacaaatgataatagtaaaattaattaaaaagagagaaaataaaatgtttacatttgatttagttgatttcaaactaatttaaaaagtgaagaatagaccatgattagattctactagatttatagtatttaactaattttcacattaggaattgcagggagccacagaaccgctaattatattagggttactgttattattagtggaagtgggtacagtataccatcaatttgttggtatgattagacaaattacagattgctgctctgattggtggatctgaatctactgatcacactgagagcataaaagtgaaaactacatttgataaagaaaaaggctgctgcaaccctgcaatcttcctatcctttccctgacaccaaaatgtatgattcaaatttaaaatatacattataaaattaaaattaaataaccaactacacatcagatgtggacatactatatgtatatgggtctcccaattgccatgcattgattctcctttaaaatattattacttgcaggtcatatttagtcaaaattatactatagatttgtagataacattacttacaccagcgagaaaagaaataaagtaaataaaaaataggatagtaaaaaaatggaaataagagtaataaataagaaattagataaaattttagattcttaattaggtccaagataagtaaaagaaaaagaaaaagaaaatattatgaaactgtttgatttggataggagaagaaaagaggaattagattagatataaaaattctattccatcgttgtatataaactttaaactctcatatgaatattagatagttataggatccaatttgcaggacataatagattatctacgcataatacattattgggggcatacataacaaattttagtgtgcatataatccactatagtagcacaaataatagattatcagagcaatggggcatgcataacaaattatcggggttattgtaaataaagtagagaagttccgttggcttagggtgccttttagatccacgtacaagaagattttcacgttaatataaacactaaaatgacgcagaagctacttgtaacagctttggataaacatggatccagtatatattaacgctaatccaaatatgcggttagattttttgttatttcatcgctagttcacatgaaatctttctacggtgaaacctacttaatttttatttcttttttcattatttcatcttaaccaaaaatagactcaccaaaaaaaaaatcttaaccaaacaatctaatttttaactttcactttatttctacactttcttctcaatttcttattcgttttattcttaacataataatggtgtcatcataatttttttaaaaggaacaatatatcgttttacatttattttgatttcaaaattaactttggctcactttactgccacccccaaacattagtacagcaatcgtggtttttgccttcagatatttctgtcttttggttacactaaggggaaaatatgaataaaaaaataaaatgatatgtcaaaaagaaaagcattaaaatgccactctagttacgaggcgaaaattaaaactgccactttagtttttttgtactttatttatttaaattacaaatatttatttttcagtatttgaatgcgtctatggtctcggttctaggaagtttacattgctttgacttcaacatctagatagcaaaccttggtacgagatagacgacacctccaccaatatgtcacactttttaaaaaaaaatagcctaaataacataggcacaggaaattttatcagattatcatatggtctattttactattcagtccaccgaaatatgtgagctgacgtgacacaattctgatggttatgtatttcgctgcagggaccagcgaaacatgtggtgtgatcaaaacaggcaggacatgtgacagacagaaggtatttcattgaagagcccagtgttacgtgacaatgaaaaaaaaatcttaaaacttcaaacggtcataacttttgatagaattgtccgattaagatatacgatatgtcaaaacactcgaaatttagagaagaagccctgggctaagtcccaaaggggatttactccactattttttctttcaaaaaacgcctctaagtgcctcaaaattaagatttaggattcaatcattcaaaaaatttattatttttctatctttttaattatttaattagttaatttaatgctatttttatttttttaattacttatcttaatttcaagcgttttgacatatcatacgcctcaatccaacatttctatcaaaagttaaaccatttgaaagacatatcgtacgcctaaatcctaattttgagacacttagaggcatttattggaaaaatagtggagcaaatccccttgggactttgcccaagacttcctctatgaattttgagtattttgacatatcgtacacctccaactgacaattctatcaaaagttatgaccatttgaagttttgagatttttttttcattgtcatgtaattcgctgggctccccagcgaaatacctcctgtttgccacgtgtcctacctattttgaccacgtatttcgctggcccctgtaacgaaatacgtgatcaccagaattacgccacgtcagctcacgtatttcactggactgcgtagcgaaataggcaacgtgacagtctagtaaaatttactgtacgcatgtcatttaggcaaaaaattttaaaaattttgcacgcttggtcgatgaccccagatagagaacaccccttcagatctaaaacctatttgctattaatttattgtggaatatttgtaattccaaatgttgccctaaatgaacctagctatatccatgactgaccttatactttacttagggatgctacccttttttgaagttggtccatgtataaaagtttagactatagagcaaggtatctagctaaagttttattgattaattatataaacccaccaacctatctatctttaatatattttatatgttttaatatgaatttattttgttagttacatagatcatggagttaggataatgtaatgaaatgaacgaaaaggttctcaccaaactgacattagtatatatatgtaaccactgctaattactaagtataattaatttcgctaacttacacgtaactacgaacactgtcgttgataattaggtttactaaattgaactcaggatcaactaactagaattaggtttactatagtttgcgttggatgttgatgcctagaatacgaacatacgtgttgacaaacagaaattaagaaagtgaaatgcacacgacttggaattatgcttaattgcaaaacctgtaatcggtgtaattgagtgatggggtcctttgtaaattgatttttgtgttatttgatcgtggaagtttggtaaagtttcaaagtgtgttttgtaaaagttgggatttttgtcttcctaaaattcaaaaatgcgtgtattgtacgtgaaatactttcggtgggttggcatatcatctttatacaatttggaaatcttgcacacttcatttgttgagaagaacctcaaaagacacacttaatagaatgattttttttttttaaaaatataagcactcaaataatcaactatagaaccataaaaatttaacttatttaattttctaactattgtttttcttttcaaattaagttttttttaaatattatatatactcgtggacataataaaagaaatagtaatattggttgtttctacatttattattttaaactatttgaataaaatacagtgacctaaaaactagcatgtgcatgtcaatactttatttcttatatacaatgacaatcttctgtatacaatcctgcaaggatctcctctacttattcaatagtttattatatcttgtaatacgtatgtttcacaattatcgtagaagaagaaaaaaacctcaactttttttatggcaaataaactcgactgagtatcaatatctgaaaaactatcgtccccaaagggatttttgagcttaaaagagactttttcttccattagttttagtccacaatatgctttgagaaaaaaatcttaacaagtagggtttttatctaatttgataattagttatgtttaacaaaaatacttgataaatcaattggaagttataaaaagttttaaatatatatgtttttaggttgaatttgaactcttattattttttatttacagatcaaatattttattaaaaaaattgaattaatagtataagtttttcgaataaatagtacaaaaattaaaataagtaatatagtaacaaaggaggctatatatgagaaattttattaaaatattaatgataaaaatgacaacattatgttaaattatacgctacaaattacgttattttaagtagaaaataaataaataaacgttaaaagttaatgagataaatttattgatcaaacacgtatactttagtcaaataaattcataaagtaattaaataagttattagataactataatagtttaccaaactcactgaaagtgacatttggttgttaattaaataagattaatgtggaaatggaataatacacttgannnnnnnnnnnnnnnnnnnnnnnnnnnnnnnnnnnnnnnnnnnnnnnnnnnnnnnnnnnnnnnnnnnnnnnnnnnnnnnnnnnnnnnnnnnnnnnnnnnnnnnnnnnnnnnnnnnnnnnnnnnnnnnnnnnnnnnnnnnnnnnnnnnnnnnnnnnnnnnnnnnnnnnnnnnnnnnnnnnnnnnnnnnnnnnnnnnnnnnnnnnnnnnnnnnnnnnnnnnnnnnnnnnnnnnnnnnnnnnnnnnnnnnnnnnnnnnnnnnnnnnnnnnnnnnnnnnnnnnnnnnnnnnnnnnnnnnnnnnnnnnnnnnnnnnnnnnnnnnnnnnnnnnnnnnnnnnnnnnnnnnnnnnnnnnnnnnnnnnnnnnnnnnnnnnnnnnnnnnnnnnnnnnnnnnnnnnnnnnnnnnnnnnnnnnnnnnngcgttagccattaactctcccactatttatttttttggctttggtctcgtcaccaccaataaagaaaacggtttcatgagttgaggttactgcctattatttccttataaacccgaaatgaacaacgcaatcaggaattaattggaaaaaaattcacttctcttaaattagaattcaatcactattcctaatgtcctacaagccgagcgtacatacaagcatgagcaaacacacgacacaaataaacctacgtttttttttaaattaatgttatgaattaagaaaaatcttaaacaaaattgttctcatattttaactagctgagcaaatgctttctgacttcttttctaatttaaataaataaataaatgttaattgttcaacactccttacatacatttactaatgtgtaaaaatattaagattttatttgaataaacatatttatgagagaggaaaataagataaaataaattcaggttctttcaaaagttaaaattaacttttacacttagttgtatagaagtttgttttttcatttaatttctataaaatttatggtgcataagttgattttagattatagagaagttcaattcattttatcttgttattacactctttctaactaaatttttattattagttgaactttatagaaaacaccaaattgctttggtttcactttttatttaaagaaagtttttatttgatcaataaaataattatgagaaaaaagtgtgttagataatatcctgtgctaacactcatctttattattatttggtggtcagaagaaaggtgttaggatcaactgttagttagctttaagccttcaaccgaataatacagttagttagttacagtggttgtacagttagctcatagattgggccttgaatgtccagttcaaacaggcccagtttgattcatgggaccttggacgacgatgtttcaagaggatttttgtcatgaaaccaagcagaatagaaagttcagaatgggcaactgtggacaagtgaaaaggcaaagacatggtagagcttcttctacgagcatcacctcctccacctcacccttcttcttatccgaggtaacaaatccaactaatatgtccccattttcatctttagcaatatttaatgttctatttttgttgctcaacttgtgtttatgcccctttatttgtttttccattctggaacaccccttagatttttcctttagaattttctcctaattccaagtattttaacaatgatttttttcccacgtttgttgcagactcttttttctgtttttttcttacatttaatttttcggttccttttatttttggtggacttcaattttcagtttatgtaatgtagcttttccatattcatatgcacagcattcctgaatgaatttcctttatatactcccagaattttgtcgtgtaataaccaacttttagtgaattagattgcagactcctttttttttctgtggtcctcctctttcattgggattctaagtgcatttttttgtctcttcatttgtagatactgttaaatatcaactctgttgctaaaacatgatactcactcaacctgggatcgtatgattttttatttttatttttgtaatttatctttctgttgttgtgcaaattggatgacattttgtttacagacaatgcaggacagtgtcaggaaggacattggtgaagttctcattggaagtcccaagtaaggttctgacaaggcatgtcttatctgggcttgctgcttccttgatatttatttctccagcaaatcaggtttgtaatgtattccacaatccaagagtgttactacttactattgaaatttcagttaatcatgcaatttcaagatgtgatatgtcccatgcccatcaggaggacctacttaacgttctcacagtattttttttcccaaatacatgatagcaaagttttaattgtggtgacaattgtagtttcatcgtgatccttgatgttgcgggtaattgtagacaaatgcaactgatgtggctgcaattgcgattgcgattcagttgcagtgactctgaaaaccttgatgctgtggccaaaatcgctatcacaagttgtttgttaaaactttgctgatggtagtgtctagagactttagctatagtggttcataatcttttttataactccataattacatggacattacctaaagcaaaagccattgctattaaatattaattattttgcattatttgatgccattactttcttttgtggatctctttactcgcatagatattttgtatcactcttgaatttttcccacatttgagttcttacaaaggctggatattgttgattgataaaaaatctagaaaatagatgtatattcttatgatgaatgagctgatctaatgtgtactcatttacttcattaacagactattgcagcagatctatctcgtgcaccaaataatatatgccaacttgccagtgccagtgagaatgcagttacttcaccatttgacaatgaaaaaggttcaaatctaatgatgatgagaggaatgacagcgaaggactttgaccctgtaagatattcaggaagatggtttgaagttgcttcacttaaacgtggatttgcaggacaaggccaagaagactgtcattgcactcaggtaaatgctaaaataaatatagcagtaaatatacaggacgacatttggtttagaaaaagcccattatatttatgctcttccaacatctttccctaatcaacttcatattattcataataaattgttgaatttggaggcacagacagaatcctaaggttgttcattatttattaggcgtgtgtggataattctgtcattcagtagtataacagttagtacatcttggagataagatttatcatttaccttatttggcttcgacaagcttcttgatgctaatttgggtatactatgacatttcagggtgtatatacgtttgatagggaagcaccatctatccaagttgataccttttgtgttcatggaggccctaatggatttataactggaattaggggaagggttcaatgtctttcagaagaagatttggagaaaactgagacacagctagagaagcaggaaatgataaaagaaaaatgctatctccgctttcctacattgccattcattcccaaggaaccttatgatgtgattgctactgattatgacaatttttctcttgtttccggagctaaggataaaagttttattcaggtatttactgaactaaaaaatatagcttaagtttgtagtcattgagcttcaaaaggctttttctgaatcttcaacgatggcatatatgacatctagtgttaatttattatgttaagataaattaaagaaacaatactgcatcatacagttctttaattaatagttattaattagcatgtaagtgtatgatttgattttgcttgtagtgttaatttccctgtgatctatatcgcagatatactcaaggacacctaaccctggacctgaatttatagagaagtacaagtcttaccttgcaaactatggatatgatccaagcaaaattaaagatacacctcaggattgtgaagtaatgtccaatagtcagttggcagctatgatgtctatgtccggaatgcagcaggcacttacaaaccaatttcctgatctaggactcaacgcccctattgcgcttaatcctttcaccagtgtgcttgacactttgaagaagcttcttgagctttattttaagcagtaactatgttttgttttaatacattttgttttaatacatgtacttttgtaacgaatagctagctattcttgatagtagcctgtgtgtatcatgtaaagtataaactacctgtatctggtgtcctgtgtatattgatatggtgttttatttttccctccatcccaaaaataaatgtttatctaaaattaaatatcgtcctatgttattttatacacataaagaaaagttattaaatagataaaagaatagtaattttataaaattaatcttaagattattattacattaaaaaataaaataacacttgttagggatattagtgaaaaaaataattaatattatattgaaaagttaaatgtaacatttatcttgagataatttttgttttttttcaaataagacacgggacggagggagtaacatttgactatttgactaaggttttaatctgtgttgcggaacaagttaattggagacggttttcactctcttgcagtcttgcttacctgaatttttatgcaacacttagattgtttcactttaaaatttatatgaattcatattgccagttttcgtactaataacacctcttataacttttatgttaagtatcttacaagttgtacccattttggagtgcatatatcaaattcattttatgaacatatatacaatatacagaccaaaataaatcagcatttgtaactagaaatgttgttttccctctcggacttgcttaaaccacataatcggttatttgggaccggagaggagtaacgtaaagcaaacctacataatcattgttaatgtttactaaagcaatttcgagtaccccttggaattggttctttttaagttttaacattccctttttaatgtaatcattgtccccccggaaagcgaatattgacgtgtatgattacaagtgtcaataataaaatcactaagactgtcatatataaagtcgtctataattaagtcctaaaaaaagtcatctaaagttacaataatactatttgatacgaaatcttttattaaaaaaaaatgctataaatgtctcacgatcaattgttttgtcaaccatcggggtagaatacacgtctttaacataaggagttaaagaatgtatacggttgtagggtcatattgataacttgggtgtagatgttccaagccatattctttattgtgatagtcaatgtgcattgaatttggccaagaattttatctatcaatctatcattttaaaaaataatcaaaacatattgatattaggttgaaagtaactcaagatgatattaaagataagttgttctccatggaaagatagccattgctgaaaattaatggatatgttgtcaaggcctttgtctactgagacgttcaagtataatttggacttggttaatgattgcaaatagcttgagaccctttgaagtcaaggtgaagaaatgttgatatgtattttgctaacggggacaattcaatgttgattacattgactagatcatgtaattttttttctacatttttatttgtcctcatcttctgccataatatgtttcaatgttgggttcctctacaatattgtgatcataagaagttttactttggttatatgcattatcattcatcactacgatgatgtaaatgaaggcattatgcttggcctatgacaagatttagaaagaggagaattctgttgcacaacactttgcaaagtcgagaggatttttttcttaaaaaaagttttattgattttattgcttttgatttaagatgtttcaattgagtaaaagaatatgattagaattttttcttaattcttttaacacttaataattattattgtacaattacattagtaattgaatgacttgaaccaaacaaaaataaatttgttcggattacttaaaatttaaaccgaacttgattaatcatcttggctttaactttcatattatccgatttgagaacccaatggcctcacctatttatagttgtttttatctcaacaaaaagataggtataattttgaaggaactaatatattcttaaaatgcacactatatggataaaatagtaaggacctggtccttttcgtgaatgagacactccttagctttggttataacgattttgtttttccaccttatggaatgaaatctatggccaagaagtgaaatgaactacccgtgagtgacaccaaagcaaaggccgtgacgagggtccagtaggattggcggtttgaagagtaaggcacaagttcctcaaacttgctctatctctttttggtagtaaagtagggtggcaataaatttatgcagataagtagaataaagggaagaaatggattccataacgaagataatatttaaatataccaaaggaagattcagctaacacaaatactatagttgcaaatcagcaatttttttagattcggaatttaattcagagtgttttcataatcaaaagtcataagactaatcttttaaaaaagtagagcactatttaaagagtaattcctttactcacgaatacttgttttttctcataataaaaaattaaatgtctatcatatatttaaaagactcaagctaatagtcacttgtctcacaccttgtggatgcaaattaagatacatgaatcctgcatcttggttttcctaatagcatggtttttggcttatttcaaaataacaacttaactcattgatagatatagattcgtaaataatgttacatctttctcacactcctgcagaaccccatatgaaacaaaattacaaaatagatggagccaaccaaaataatccacaattcccttaacctgaaaagcactcaaataaatagttgctttcctgatttagttaacctactattccttgccaactaaaacaccaatttacttaaaaaagccaatggaagagatcgtcctacttttacctttcacatgaatcccatcagatccagagtttcaaataacgacctagctagtagcatgtacttaggaacatgatgaaacttaaaaaggtggcacagtagttaggactagagtgttataactgcaagcacatgaatgcagtgactatgtcatcaaccaatctcccatctatctacatagacctatgccatggatttcagtttcagatatagaacataaggtgaagcattcttgtgaaaccacatctcctgtaacaaaagaaatgcctcaaaatctctgcagtttcccctctagaacaaacccacaaaccacccttaaatcaaaagattttgctttctccccaacaccaaccaacaaaagcatgcataaatccactacccttgactcaaatgacacaaaagataaggatgaatttcccccagtagaaataggaaccagaggcacagttgcatcactcataatgcaagaaattgagtacttcagcagaattggttccaattcacaaaggaacaagtcccatatcacagaggtgagttcatccattagtacaagttctacaaccacaattgtatctacagtagaagaaagtacaaagaaaaagagaggaagtagcaagcttttaccaagtatgtgttctatggtggatgtatcagacagtggtaggccaaatgggacctcagccttcagttacaggaacctgaagtctgacacaaaaaaaattcaggtctagataatgctctcggatagcttcgaaaaaccgagcttcttaagacgacttgccaaaggtgtagcccaagccttttctgcattcccacattttatgtccacaatttcaacaatgttaggtatctttttatcatttttctccctcactggagttctgaccactgaacatttatcagaacctagcatgggtactctctgtgtatttctgccattagtttttgttttctggggcatgccattgccaggtcctctacggtttgtagttttactgcttccactgcttccggcttcaactgatgattttctttgttgtagtcttttttgggttgtactgccacagggaacagaaacaggaagtgtttgagttttacttcttgttgaagatacctgcttctttgatgcagaagagatgtgaaccaattcccttgtcattaaggaactgattgttccagtggtgcctagcttgatggatcctcctccaccttttataccttccagactctgagccatgctcttattagtaacacctccaattctatatccaaatgttccagtctttgagatgaatgctcccagcagaattattcagtgatctgttgcacttacaaattagtgtcaccctgtgattgtaaagtcataaatttcttacaaattatttggtttggtttatctttcatgtattaagactccgtttggataaatttctctacaaatacttatagaaaataaaatatgaaagtaaatgaattgaacttctttcatacaataaaatcattttatacactttaattttcctagaaattagcttctataaaagttaaagtgcaaaaattaattttaatttatgaaagaagttcgatctattttactttcttatttctttttcctataagtacttaaaagataaatttatccgcacaaagtctaactatagaaatagagagatatgcgtcataattttcaagagaaagagggatggggtggagagttactagattcactaacaaaaacatagttccagcatcaaatcaacaacagcagaacaacaattctgaaataattcaaaaacattatagactgtgcatcacgatttcaaaacaaaacaggtattcatacactgcaatgtactctctctttgtatgccatgagacaacaacaaccacacttcataacttcaggatgagaatgccaactcaactataaaaatttatcatggaaacaaggggagagaaaaagaactaacccacatagcaaaaattcactaccaaatcacaatggttgggatgaagcagaatcaaatctaaaacactacccacattaatagaaccagagaaggataaaaggaatacagcttcaccaaaagacaagctaaatcaaacgcaagaatcatcaaatttgacaaactaaaataagcatacatacacaaacagaaaaccaatgatttcgtttgaacaaaaaggcattaacttcaaattcaatcaaattgcctcacttcaaagtgtggaaatctaattctaacaagtaacactgcagaagaaagaagcaacattttagatccacaaagagaggtaagatcaaataaaggaaaaacaaagtttggtatcatacacatagcaagcttatggctccacacgcatgaaaattgcagatttgaaacagacccaacagaggtagggaacttttttgctaactttttgagctaaaattcagtgaaattgaaagttcggaggcaacgagtttgagaaactgcctctgttatagaaaaaatcatcatatcatatctaatccaaccaactttgaggaacaggttctgtgtcttattttgtagcgtgcgcatccaatgctgtgttgatttgactcacaaacataatcgtcgtggaaaagttaactttcccaccaaatattcactactcattatggagaaatcaaatcataatcatcaacatagaatactgggtggaaattccaaatggaatgccactctctagcactatctttcttttattacttgatttaatagacaaactgctaaaataatttgctacaataagttagtaaatgtagatggatgaattaatgatgtcatacttttttttcttaacccttcactttttattgaaaaagggaaaatggactaatataaaaattgtctgtcaaaattgaacttaattctatgattcaattttaatctgaaatttatgttcaatcactcaattactgattacaattgtaataaaattgtatgtttgaaataagagaaagaaaactataaagtaaaataaattaatttttttataagttaaaatcaaatgatgcaatttaatttttatataaaaagaattcatctaaaagttgtgatatatagattgattataatttataactttattaattaaattgttactaaaaaagtaatccaaaacctaactttgagatcccaagagaaaagggcaaaaagtcagaaattggggctgatgagttcacagttgggcagaagaagaatcacgtggtcacaaaccggccaaggcgacaggatccaacttattacttacctgccatcatcctaaagtacacgctccactctattgtagtactacaatgttatcacatgttcataattttagatttaataaaaatttataaatatgaattacgtgatagtaatttttaaattatcagaacattttataaaactattatttattaaaagaatattcaatagggtaacttattattcttctaatggtaacataaaacaaaataaacatttcaacacacttgtgttttttttctctcttcataattgaagaatataataaaagtttatcacaaataataaataaataaataagagaatttaacataccacactatgactctcgagaataattttaattatgataaaaatttatttattttattattattaatgttaattgctagttacatattttcccatattctttttcttaacgcggtctcttttttatattttttctaacacgtttttattattaattaaaattattggaaattataaaattgtttgagtcttaccctttatttaataagttcactcaaaattttgtagttgtcgataaattttggccaataaaaaaaagaatgtgttagaatctagagagtgagttgctcctctttattttaagaaaattgatttctataataatattcattattttaatttactttacaactaaatcactaaaaggattttattactgtaataacaacttaataattacgtttttgttttgtttttcacatatatcctctttacagacaatttgttcaatgtgcaatttcatagtgcacctcttccaacaagaattcaaacattagttcatcatattatgagggattagaagcttatgctaaacccaactttcgtcagtaatcacatttaataatttgcaaaaaatcattggatgtcaataatgaaaaaaatgaagaaagaaaaggaatggaaagaaagtattttgtgtttaatttgtacataattaaggaagaaaaataaggttttggtaaatttgattatttcgaatttagaaagaatgggggtgtgtgtaaatttgagttaaaagaaaaaaaatccttgaattataaaatattgctagttttgttttattttatttaagtgatgatttttttaggttattattattttttaatttatcttgtaccttgactagttttttttttgtattattggaagcatgtttatgttattattttttattacggtttatttccgtttaaaggtatttatattattttataatatatctttgtttcttattttctactcaattaaattagagaaaagaaacttattttcctttcctttcactttatattctaccaaataactaaaagatcatttttttttctttctttccacttacgaaaccaaacatagtatattttctattcaccacaccattctaggtccaaatcctaccacatgccctgtacaacaagcgcatggctccgaagtccgtacgtttggaaattgcggcttggaaacagacccaaaacaatactttgcactgaaattaaccgaaaacgaaacttctatttggatttttggataaaggaaatgtatgcagtgacaaagctttttatataaaaaatatattaactcttatattttatcataaataactaaagcatataaattatgtgacttttttttaaaattatataatttcagtaattatgactttaaaaaacttttcatttatatataattatgcagttcaaatttacttttgaactctccacaaaattcctctcgcaataaatatacttaatacaatgtgtcataaggtcttcaagaacgtcatatccaaccagcattttgacacactcttcgcgtctcattatggagtgcacatccactgctttgatttgattcatatcattgtggtaggtgtgccaaaattagttttccccaccaaaaatattcataattcagtacgaagaaaacaattttaatcatgtacataaaaatagtgggtcgaaactggaatgcctttaactagcattaactttcttaattcaatggtatttattattaaattttttatttaaactcaagaaaaagtgaaagtttgtgaaaaataaaaatgaattatgtttaataatagaacccacttacgatatgtaaaatgtaaatataaaaaaatactggaatgggaagtgaaagtttactctttcacaaaaatagaggacaattacgtagtttgcactacatggattttatatatgatgatcaaatgacaaacttttcatcaaagaataatcaggtaattagctcctgcaaggcatgcataacgtttaaagtaggtccatggtccattcttgtaggccatttttgcgctcgttcataagattcataaattcatttgtacagaatatcataaattcataattctgcttgatattactgaaagttgtcaaccttaattgtcactggctatactgatcatttgtgcatgcaaagtgctatttgagcgtccaattatcattgcatgatgtttctacaaagaagtatatgtttgcaacagatcaacagaaatgcagatagattctttttataataatttatatacaatattgatatagtttgcatcatcagaaaacaacaaaccggtacatgatgcaaggcatgaaaaaccggtatacattcaaaatatagaagcaaaaaaaactgctaactagagaagtaaaacgccgaggccagtggttttggcctttttcttccttcaaagcaaaaacgtgttatgctttggtatattatcaaaacataacactggaaaatgtcctaggatgtcaaaaacctctatagaaatcaacctcagataatgatatttaaggcataccaattctgccttgaaaatagaggcaccagagtagcagtatcttttgattgcaattaccaaaggaaccatgcagccaaagatatctgaatgagaaaaaatctccaaacagttgtcatggcttttcatgctgtataaaggactaccactatttcccagagtaccagttttgagcacacttggcatcaacagagaggtcaactttaagaatgttcttgccgttgaagggtttggacatgcactcaacaactatggacttcgcaacctcagctgattctgttggtccttccaatatgacttcatcatgaacctgctttgacatatccaagaatcttagtgaaaaagtagcaagattggaatagatatctgaacacattcagatttgaaataacctcaatatcagaacatactgattaaaaataatggttgatagaaattgtaactttatggttactaatatcgtttaattgcttttagattaaggaaattgcctcaaagttggcaaaacgaactacttgttgtggtggaatagttcaccaatggaacaagttgtaatgtaactgcaattacattggttgataacaagaactacaaccaagataatgtcattaataatcaacaggaaaagaagaaaaaaagtacggactacataggtatcacttaatttctccaatgatccatagaaaatgttttgagaagacagatgcataaattattgattacatagtaagcttatagaatatgagtcaaccaagctcttgtttgcgtattacttaatgcttattcctccaatccccctcccaactcagggaggaagaatggatagaattgcttgttgattcaagactctagaataatggcaagtgagataaggtgtaatttgcagacacactacaataaaagcaaggaagaatttttttttttttttttttacaaaaaaaggaaatttagggggcactaaattacctgtagaagtaacttccacccaagctccttcaaccgtttattcttggaaatttgcaacatagcacacatggcaacatcagctgcactaccctgttgaattctacaaatcagaaacccaaaaagaaaggtatgcatgtgggaatgggtcacatggtaatagcatctccacagaaagcattgggctattatgagtcagactgaatcttcaacatttcagacagcacgatagggatttaaatgacaaagtaatgtatttatttcaagaaatcacgtaacctcaagccattatccaatgattaagattagctcataccattaccactccacaagggcctatttacaaattcacaatctccccattcgcaagtaacatgatgcatgaacagcaatgaatagtttctactaaatgtaatttttgtcaatctaacaattgaatcataattagttataaataacgatggtgtaaaagctaattttagataaattagacattatcagtatatttaatcaaatagtaaataatttcttaaatttttagtaataatatatttatatttatctttacatttacaaactaatggaatatatttacaaattctatgggcattgtaataaaccaacaatcccaaaagctataagttgttaggtaaagacatatgttttggactatataaatgtactcatttttacttactatcaatgaatgaaatctgaattttatgattcttctttatagcttttatttgtaggtttaatggtgttttcttaggagtagtggtagagtagaattagcactctatccaatggtgctttcatcagcttactcccctcccaaatccaccacaaccaccatggaagacaaccttcaaggtattttccgaaattagatgccttccagaaccaactcaaccactatgaagaaaataaaaaatctcaccacactacccttctaaggtccatggattcctttcatgacactttcacctccaccgtgcatagcatgatgaagcaactctgctctcaatcttcaacatcagacaccacaaccactgccgcaatcgccgccactgtcgcaaccaccgccgcaacagtcgccaccatttccaccacaacaaagtttctcctctccgtacccttgctttaacaatatttcccatacaaccgttccactcatgaacattttccccaaccccaacccgtctctgtatcaccttacccacttcctggtgttgcaacaaaatctattttccctacatcaaccttttcaatttttgcaaccccaacccaccacccacaatccccttacttcaccgttcactccaaatccacaatcacaatacagcaccaaaaagcaaccaatgttttgcgcttgggaaatttcccagccgcactgatatcacccgtccaatctcactgcaattgaacctaacctccttccccaatcacacccgtccatcatattagaaaataagacatctagatcaccatgtgtcctttcacccatgtacactcccacatcacagctggctcccactctctcaattgcatcaccagcccttagatctccaacgatccaattaccacacatctaagccattaaaatcccaccccaaccatgccacatacatcctctctaaaccatctccacttaccaaattttttcaaaatcctaacaaccatcaacaccatccatgtgtctcccttatcccacatagtgcactttctcataaagttatatttcccttccaaccactggatcaaaacaagtctcataagccttttcttttttcacgtactgccaccaatttccaaaacccatccacaattattttcttgcccccaaaagcaacatactcatcatttgcaacaagctgttgctctcaattccaattgttttcaaaccttgaggacaaggttgaatgtgaaccggtgggtaatgataggattggctctaggcccaaaattaaatggtccaaggattatatagggtggacttaaatatgtattttataattatagtttttttttttaatttgtgttagaataatatgatgttgacacttggataattattatccttgattgacatttttaggactacataaatgtactcagctttacttattatcatcaatgaatgaaatctgaattttatgtttatcttctttatagcttttatttgtagctttaatggtgttttcttaggagtagtggtagagtagaattagcactctatcaaatatatgtaaaggaaaaataatttcacccaataatggatttcaaaaaaggagattcctgatagggaacagtactaactagactaatacaagatgacactattgtaatgttaatacaatcaaaatctattcttattcacagctctatctggactatcatttcaatataaactatggaatatgatattttacaagtgggctctcaaaatgtgatctcatcattcattgttcttaaaagggaaaagttccaaactagacaagaatcacaagataaataattcagtacattttttatttactagagagtgtaaagacagttagatagatgagtgagggagacacagtattgatttgtttattagaaagagctaaggacctgcactggagtattaatagcagctcgctcaatgtgacctttctgataggtgttagcttgggccatcaaagggaaccgtcgagctctccctagcaatgtgtaaacacaatgtaacacgcgagcttcctttttacgctcctcttgccattgcaaaacctcttttctatcattgtaccaaaggtcaactgttttcttagcttctttcacagaaacctgagagtgaacaatcaaataataaatcaagggcaattttcacctttctaaatccctcataataagtaaaagttctgggtaccttccaatccttggaaagccccacaggagtcttcccatatgcaattgagaagttaagcattttagcttttcttctttcagaagcaaaggcatcctgacatggaaggaaaacaaaaatcaaaacatgatcaatcatgaattggatggttataagttataacagtaaaatgctaaaacagctttcttatatcttgagggaagggcatcaaataacgttaaactgctaaaaaagcttattaatgcctggtgtattctgatttacttctgttaatatacataaacattattaaacacattatatatcaaaaaactcggtgaattcttctactaccactgcaactatgttttccccctaaacagtgttctaatgagcagtagctgtcctttatttctattggaaagttcacaagttatttgtatttgttctgaattttaataaagtatatttattctatttgccgttgatggatctgggtccaatcagaataaggattagtcctccctcatgcatctgccagcactctggtggtcactatatttgacgtcatcagctacaagaaataccaaactaaagactaagccactacttccacatctcaatgcaatggtacttctatcagcggacagttaccttcaaaagaggtactgggggtttatcttcaccaggctgaggatgccactcaagaagcacttcctttttctcaactgctttacgaatatgtgggtacatattcattgcagtccttgaatggaaatctccaccagcttcaaaagcttccaacatgctcttacagtctgcaaggtgtgccagaatcctaagttccagctgtaacaataaacaaggcagttaacagaatgaaatttcttgaaaatagttcaattagatagacaatatagactgttaacctgtccataatcagcaactataagagaattcctgggtgcagcaatgaatgcttgacggattttgtatcggtccttttccagagcaggttgattctaattcatgaagtgtatgtgttaggttctatattgttttgaaagtctgattaatctagtagatgtaatatccacatgtcaatgtcaaaatacaaattgaaaatgaatgagatgcattgtgcagtccaaatttaggatccaaatcattgtaataaagtaacagaaaaggcatcaagaccaagtagacataaaatgattacataaatgtgtattgcaattagcaaggctgtgattagtccaaaaacactaattttaataagatatttttaactgaaggaataaatgaatacaaaagaatgtacatttgagcagagatgtcaagaactgactcttgaccttgagatatttgatagatgacggcctaaaaagggttttatatttttaacatgctacctcacacaagaataattcaggtttgaaacacaaataatccacagacctatttcaccttctgctgaattttatttttttgttcaaccttactgccaaaatttagttaagaaaaacagcagcaaaaagatagagtggaggtccaaaatggacttatatgtctaataggaagaaaccctactaaaaggagaaactacattttaggttaaaagacaaaatgataaagccatctactaagagtttagcatcaaggaaactgtatgacaccaattagtgaacatacaagcacacagatgaaggttaatggtcagatctcaaatgtatagcacttaaaaaaatttgaagttcacaacaactactattaaaatgaaaattcctaatcaaaaccattagagaattctgattaatctaattagaataacctgcagatttggccttcttgctgacaagcgtcctgtctctgtgttgatatttaaggaacaatgaacacgaagatcgtttcctgatatattatgtccctgacaaagagaaactgcagctattatagagcacatataaagagctatctccaatgagtattttaaaagctcaaggtactgtggtacttgtgagtttggtgcacaggtgagttgtcaagcatctcattgactgatgtttatataataattataattgtctaaaaatatcctttctagggaaaaaatagaaaaatatcatcaatttattacggacaatatgaacagtatggaagtttgtatactagtttcaaaataaaagaaattccaagcaagctcaagaaagttcatattgcaaaccaaacaatcaaaaaatacctgcaggggaaggatgaagttggagatcaaagagttgattgaacagacttgacataaagcagcaattgcatggcaagcttctctcccttctttctctgttggaaaagctgcataggctgtcccatatgcagatttatcaatttttacaggtgcaacttgactttgagaaggattttcatcttcatcatcaagatccaagttacaatcctcatcaaaaaagtcataatcagcggaaatacttccagccagggcctttaaagcatcaccactaactgacggccaaccagttgctgtgtacatctcagtctccaggttataacctaggcttgtcaactttatatcacgaaatttttttggagccttcttgccttcttcaatcacattatcaacattgggaattttgaatattcgttcagttggaagcgtctgattggagtcctttctgtaatgaagcatgtgacaagtgaaaatgaaaattttacttccatctatatccttcagctacttcgttgtaaacagaaaagttcataaatatcaaggtaggtaccagtagtagtaccatcattcatgaatagtgaatacattaatcttaagaatatcataaatatttcagcctttgactagcaaatcattaatttaagattgaaataaatgctacacgtaagatttaaaaaatgtgcacctgttcacaatgccaccaaaaagaagctggcgcaactgcgaatcacttcccacattcatatactgggcatcaggacaatacctagtggcccacttgcggaatctattaacagcaacctcttgctctgctttggccaccttttctatgcattcaagataagcccggtcaactagcattccctcagattccatcatgactagaagctcaccaaatggacgccaatattcattgtagaaatcatacatggttttcccataaacttgcaaaccatcaaatttccagggcatgtctgaaagatggctctttaggctttcatacagcttcaaagtgctgctagcatctaaggcagaataacatatccaaggtatgcgctcatctctctgtagctcttcaacaggagcaatgatacttgttttaccctcagatccatcctttttcaattttttcttactaaatatagttttcattgacaccttaccaatcaagtccttttcatggttcagctgagccctagacatgacccttctgtcacctgtaagtccttcaagagaataacccccatccaaatgtcttgaagaatcccataatcgtgccatgtgcattgtatcagcatgaaatcccgaaactttgaatccataattctctataacatgacagtcaaagctataattatgccagacctacagaatgcaccagtgactcggttatttcaaatatggtttgtaatctctggtcacgagcatagacaaacccaggaatttaatgccaatatgattttataaaagatagatttaattttctattactacaagataagaatatctaacaactatacaaataaaataaaatagaataacaaatcatgctagttcacttctatcataagatgaaaacttctctgttctatacaataaaaccatgcaccaactatcctaaatcaggtacacattaacttaacattaggaatgcaagttgcaacctattcttagcatattattgaaaaattgaatataccactgaacacacagtaaaaatcgatatggctctctgtataatatgacactaaacttttagattacctgaggttaatttcagaacagattgtagctgattgtcatatatcttaactaggaaggcatatttcatacagtagcaagcatagaactaatatttgagaagtgttgcatgttgaggagagtaataggattaagaacatagaagggatagaagaagaaaagttcaccttcttgatggaagaatcgctaaaaaattcagcaaatttttctaaaatctctttgcctccaccatcaagaacatctacccagatacaggactttccacctccaaaatcagcttctggaccacaataaatgctgaagcatgttatctccccatgatctacaggagtttcttgtttgacatctatcttggccacctttgaagacaataaaatcagcagataatgtgttacacaaataaaaattagttgaattcatgtccaaagtacacaaacagacacacgtgcacagaagcaacaaaggatataatctagctatatagactcttgtgatatggagtaaccataatacaagtaaatacagtaaaaagaattatacctcggtatcacatgcataaataagatgccggaactttgttgtaagcatcttagcaacttcctctgcaagaggaatattatcaacaaccagaatatcatcatatatactacaaagcctatcccggagctttgattggtcagtaccacatgcctgtttagtaagtgttacattagctgaatcctttgcagttccatccaaaccatgatcaccattgactacagggactttttctttaccaatccccaatgaagatccattatactggcgaatcaccctttcagaatccattaacacctttgaattgtttaatacagaatagttaacagaagatgggacatgtgcaccagaatcctgcagtacaatattgctatccccgttcttaggaacagcctggttctgatcaatggaagcaactccattagatgcactaaaactgccattttcactctcaaatttatttgagccattcatttcctttttattttcagttaacttatcttttgctatagtccagcctctataatcaccaccagacaaattttttcctgaagtggtttcggaaaattcattgttgcaagaagccatgcccatcgtcctaacttgggcttcacatgaatgcaaagagttcagctcttcctcctcagtcatttcctccaacgtgctagttgatgtatttgaagttttcatagatgaaatgcaaactggactcttgcacagaaaattatgcttacacctcacgccattgtatttatttaaccccgcagatatcccctttagacagcatgagaaatctgctctagatagtacataatttctaagcacagtgctatttcggagggaaatttggaatgacttcatttttcttctgcaattcacatcatgcaacaaaaataaaggttccaatcaatgaaatgtagccatctacaagctaagaaaaagcttcatctgtaggcatgtgtggtacaaagagaaaatatatctcttcatcactctattcccacatttactaacaaaagttaatccccgggtagcatccttaatattaacctatttcaggttttatcatcaacaaattgtcacagaagttacaatacaagtaaaatttgaaaagtcacacttgacttaatgttaataccagtctcaacctttcaaaccagtgaagaacaacaaggcacactgacccatagaagtaaagacaaaaaaacaacaatcagcatattttactgtgtaacataaaaacattaatttcttaagctaaaagcagaatacccagttggaaaagatgcaaaatttaaggacattaaagagatgggcgaggtcagaagcaacaaaagacatgaaatttgaagtgaaataaagataaaggaaaaagggtaaaccgttgcagaggctgagaaggtaaaagggaaggaagagagaagggacttgagaagcagccgcggcataaagggcagtgtggccttaaagcagagacctccattgaggcagaaatcacctccgactgctcctgctccctccactgttaaacagattaggagccagctacttaaatatataatatataaaaatatacatacatacatatatatatatttatatatatatatatatatatatacacacacatatatatatatatataaaaggagacaaaatatttgaaaaaccttggccattaatataaaatacgtataaaataaaaccccaaataaaaataatgtgttataatatttaattgccacgtaatcttatgattggaaggctaggatgccctctcggtcggcggaggcataaataggagtcttaggtgcggtttgacgtgcttttaacttaaaattatgaataaacactcatttttgtttttaaatttatatggtattgataaatttatttataatagatgaaaatttaattttttttccaaagttaaaaaaagtgcatcaatccattaacttcatctattatgattaatgaaaaagtctattgtattctacatattcaaaaatgtattttaaatatttaaggataaatttattagtgttttatttaaaatataatttaattttcattttctctttttttttaattattacaaacataaaattataataaatatgtaatggcatgctaatgaacccaaaaaatggaacagtgtcattttgttatcaaataaccttcttttatttttaatgcttaattgtataatttataatccaaactgttattattttgtaaattttatcggctaattttttaatcattttatcatcttgtcttcaattttcacgtattttactattcgtgttttttcacattttattattatatttttaacaaaatgacgtcatttttcataaaatagtaataaaaaatttaaaattttttagggacagatcaacactaaagtgtacaaaaattaaaaaaaaaatacgataatgaagcgtgcaaataaaaattggatggtaaaagtttcgaagtgctgttaaaaaaaaggcttgaagttaaaacaaaaattggaggtcctttttataaatttataaatacatctgaattgacagagaaataatataaagattataagatactatataacataatttgagaaaaatattgaattatgtaacctacttgtgtaatctatattatttattttcaatgttgttttgtttatgcaatgtttatttttacaatattttaataaaatttaattgaaataattgattatgtttttcaataaattatttcattaaaagacaagttcaaataaattgttaaattttcaaaatatttttcattgtctcaatgttaagattttgacataaaaataaataaaatatatgaacataggaaaacttataaaactcatttaatacttttttgtttaattgtacattttactacttcattgtaacaattatttttcacttagggtgcttttaatggatacaacataagaacaacacaagtcaagttacaagataattttatcttatatattatttgatggaaataaataaaacaaactaaataatataaaatttactgaaattttctttttaatattaaattatctaggtactatctatataattatgagagcatcatagagccctaggccatcttcattcaacccttcattacagtactgtatcctgaaatgggtgaattttcagacattacaagtgtttatgtgccgttgagagaggcaatttaaaggatgagaacgtagattttctttttttgaaagtgggaccaaaagagagcaatgtaatttattatggttaatttgaagacatttcttcagcgacttttccatgtgtacaagatgaattgcttccttattagcaaatatatatctttattttgtgaagatagaccaaagtttatgttaaagtgcaagtttatttctgccactaatgatggatgataatgttctttctgtcaaaccaaaaggaggtttccactttgaactggaaaccatttttcattatcatctgaaagatcagaacactcttcatgaaaccattttactctagataagccattttaaggaggaaaggaattgcattgacctcactgctttggttttatgatcaacaacacaagatatatggagtcaaatgttttgtcgagtggtattttccattatgaaagctgaaacaaaaaggaaacattgtaacagtattgattagagaatctcgaagagtaggcaattatgaatctggtaacaatcttgtcattctattatcaatatctattatctaatactactactcaataaatcttgaacatgcaaaaatatgtaaccgttttgatctattttcataaggatgccaagtggcatcattaagaaattttatagaatgattctcaaacttcattagcagctgctttttcattcattgtccttttctgtaatcctctactgttttcaggttcgttttgtcagctacattccccatgctcgaaaaaagtctcttttgaacgttgttgtcttcccacttgtatatgcctctttgctaaaacatcaagagctgtaactacgtcactaatcaaaggtcgggtatctgcttcctcctgaatacacattgctgcaactgctattgcttggtgtagaccctttgttgggtagttccctttcagcaatggatcagccattgatgaaaatttccttctgtctttgaatagtggttgtgcctgaaaacaagaaacattatgaatgtcaattgctgaacatttgtgcatattaatggtctaagcttaaatttttggactagttttcatattgattagagggtaaaatgtgttttacgtccctcaattttcagtcaaagttaatcttggtatctacactttaaaaaccatgattttattttttatagtcatctctctttatggaacatatgatactagggtcagagacgaaattcaccaattacaaaaaatacgatgaccaaaattattatttttaaaatatggggactaaaaccaattttgaccaaaaatgaagggacttgtgatacattttgcccttgattagattataaatcctgaaattttaggtcagagaaatatgattttaggcacataataaaagcttcatgacatacccaagagaccaagttttgctcttcagatggtcttgactgatcaattgctcttcttcctgtgatcatctctagaaacactactccaaagctatatatatctgattttgtagtcaattgacctgttgaggcatactcaggtgcacagtagccataagttcccatcaccctggtggatacatgagttttatcaccagttggaccaagctttgcaagtccaaaatcagagagctttgggttgaagttttcatctaatagtatgtttgatgctttgaaatcacggtatatcacaggcggatttgctacttcatgtaaatattcaagtcctttagctgcacctgctgcaatgttcattctagtacgccaatccaaaggctttctgttcggaggtagttctgacaatcatttttcttttcttgttggtcagataacatttaacatgcttatcacaaaaaaaaaaattaaaaaaataatactagggtaatgttttgaaaaagggaacttccacggtgccagtcttgcagatatatttggtttctcacacaaatggaaagataaaacataatctacttaaaaccatcaatatgcaagttgttttatgttgtaactaataagtaataaccatgatgatccaatgtgctcatctggtcacactgccactacagactacacttagtttattgcatttattgaagtttgatactcaaattggatgttactctcatttttatccgtgatgcattgcattagaagacataagaagcatttactaaccaagaaggtgatcttctaaagagccattcaccatgtactcgtataccaaaatcctttgatcaccatctgcgcaataccctaccaaattgacaaggttagggtggtgcaagagactcaaaatcaaaacctctacaagaaattccctgtttccttggaatccattcctattaagtttcttcacagcaacaacctgcatgaaaggaccacagcatttagaagttttttcttagcataatattcacatagatgcgagttgaagttatacctgatttaggcttttgaggcgtcctttgtacacccttccaaagcctccttcaccaatcatattgtcagggtgaaagttccgagttgcaacacatagctcgtgataagaaaaagtctgagaggtaatattccctttcccaatttttgctatttcttcttctatgtacttccgtttgctggtatctacaagataactttgttcaagttttaagcatcggtattcatcattgagaaaaaaaatgtctgacaaagctgaaatccactatatagggcactataagaccactttgcacctttagcttagcaatctattgtaaaaagtcaaaactctagaggttaacaattgagacacaactattgaggtagagtaagagatccttaggtttatgataccctaattggtaaggataagactcatagctcacaaggatgtgagtttgaatcctgttgtcaaaatgataagacttcttcattggtacataatctgtaagaacttggtggcacaaattgtttcaaaacatgttatcaacaagctaagaacatcattaatgattaaactaggaagggagcctaaagagatgcacgagaatgcatttcacatcgttgaggtttcataataatcaaaaagttgatgaagcctattgtgatggtataaacctttcatggatttcaattttaggatttcatgttgagataaataagattgtgctagaggaaaataatttgtcgtggaaacaacattaaactgtagatatgagacattaaattgaaaaaatgttggcccgaaaatcgatacaatgagaaaattagcattggagcttggaaaaataccagatttaaaacacatgttggctaaccatggcagagcttttgcgtgatggtagttcttactgctccttttcaatgagttattgtcgatcttctcttgtgacgtgcaacatgaaaagaaactcatcttccactcctaaataactgatctaaccaaacccacatttacagaattgcaagttcatgcatctgtttttcaaatctgtctcttagcatgcaaatgttagccaatgatccaatgcatgcagtcttagaccctccagaagtggtttcaaatcaatttaggaagtttttcattgaaacatatgccctgcagaaaccaaattgatcctgagttctagcttcacacaaactttcccatatggcatggttacttttccttcattgttattcaaaggccatagttaggaaaagaaatgaatgtcaaatatgctaatccaaaaatgaccgttagggagtcactcatctttaatatcattatctaaagttcctcaatataggatttcattaagtgttccctcttaggttgcactttattatgccaaccaaaatggagaggatcactcctttatgaaactagtcaagaataaattatgacaactattttatatggacagcttatatctactttgtatccttcctatctacttcagttatattctgtttgattgagcatgtacctaaatttgtgtatgatctatacaatacttctttaaactttttgaatgacaataaactcacttaaatgatatgatgagacatcaatttttttttttttttttaaaaaattgagtttttacttaaatgttccttaatataccaatctctttaatagtacttaggtggaatattatatgtattatattacattttaaattataattttccccatctacatatctgtattcctaacttatacaaaatataaggatttttttttcactttgattaaatgaatattttcttgtattcttgttcaataaaataaaatatttctaatattttttatccatacaaatcgaagagaaatagtttgaatttataacaacaactcatatattttattcaatcaatagagctagaatcatcattttaatcttacaaatattagtatgctattatgttaatccttcaaatattatgaatctaaaatgtcactgaattcttctgtataaagtggtgacataaaattagttatttttattttttaatacatttaacttaccaaatttttggaaaaaataatatagcaatactctaatttttgaaggagaaaattaagtgtttagtttttttataaaaaattaaggaaagaaaagactcactctgtacacgttccaaagacaaggtacactaataaaaagccaattttgcaaggaaaattaatagttcagtcaaagttgatgttataacaaaaatcacagattccagagaagatattctttttgaaacatgcagtccaaattcaaaaattatttggaaaaaaaaatatgatatactgttaaacatgtgatatgccgaaaatttaaagttatatttttgttgagcacgtcatttttggaccaatatatattgttaatttttcatgaaaactggcagagggcggggggactgagattccaaaaatacagcaattgtgattctaattcctgttagatgaggtatttacatttatgctctgttcggatttggagatataaaaaaaaaaatgagagaagagaaaaaggataaagaacaataagattgaaatattatattactcggatggataagtacaaaaataaagatgaaatcgtgtatttctggggtgggggagatgttttctgccatatgtatcattgttagaataatagtaggattaacttttttaatttttatgtcaatttatttgtcactggctgctataatatgggaactaagaaaaaatgatttaatttctctaaaataagatttctctaaagtgaagaaatgcaatttagataatgaaataaatacattcacaattatttattagaaacatcttaacttataagaacttttcaattgtaatatcttgttacaagttttttaattaagacaaaaatgctgaatttctaagtttataagtatttaaaaaagaaaataaataagattttttaaaaagaaattgaagtatacaagttaattttaatttttatataaaaaaatttaattcactttacctcattggtttattttatttcgtcttttacaagtatcaattcaaaatttcattcaataactaaattaaattaaagataatatttgctgattttgcgttccgtcatacgactctttttaccaacaagggnnnnnnnnnnnnnnnnnnnnnnnnnnnnnnnnnnnnnnnnnnnnnnnnnnnnnnnnnnnnnnnnnnnnnnnnnnnnnnnnnnnnnnnnnnnnnnnnnnnnnnnnnnnnnnnnnnnnnnnnnnnnnnnnnnnnnnnnnnnnnnnnnnnnnnnnnnnnnnnnnnnnnnnnnnnnnnnnnnnnnnnnnnnnnnnnnnnnnnnnnnnnnnnnnnnnnnnnnnnnnnnnnnnnnnnnnnnnnnnnnnnnnnnnnnnnnnnnnnnnnnnnnnnnnnnnnnnnnnnnnnnnnnnnnnnnnnnnnnnnnnnnnnnnnnnnnnnnnnnnnnnnnnnnnnnnnnnnnnnnnnnnnnnnnnnnnnnnnnnnnnnnnnnnnnnnnnnnnnnnnnnnnnnnnnnnnnnnnnnnnnnnnnnnnnnnnnnnnnnnnnnnnnnnnnnnnnnnnnnnnnnnnnnnnnnnnnnnnnnnnnnnnnnnnnnnnnnnnnnnnnnnnnnnnnnnnnnnnnnnnnnnnnnnnnnnnnnnnnnnnnnnnnnnnnnntgatttcttccccattattgtaaccaaaaagcttcatctttgatttgaactgatgaaatcaaaagcaataaaacatagctagctccaattaaaggacctaaaatcgacaataatcagaagataggttcagcaatctgttcttagattagtgaaagcttgccctaattatagtttctaggtatctagatcacctactgaaacagaaactgtaaatgctacacgatcaggacattaaacatggggaaaaaattgaattaaattgcacaaagccatcgtgataaattttcaggtctttcattaacatggcaactttttttaggaactcttcacctgcctcaaactgtattgaataatgtatttatttacaattaaattcaatggtatccgttagcaataagtgcaaagggaacttcaaaaaaaaaaacaataagtgcaaaaggggaccatatagtgataaacaaaaaccaagcaaaaagggaaaatgtgtcttcaagataggcctcgatcgacttaataaccttcatctatatatgaacatcaactcctgtcctaaaatacggcactatgtggagcctaaatgtggtacaattggtggactgtggacatatatataagactaaaacataaaaatgattttaggaatatgaactggaacgacaatacttctgaaaagtgcaatgctaagtaaatttaaagttattataagccttcaaaagtaacatctaataatgacacaaggaatccaattataaccccaactaaaaggatttcaatttgctgtgactgtgagacgactatactcacatggaattagaagaaatggctccaattagtcatgtataccttctaaatctctgccagggcttgacttctcttagatttaattgttttacaatgaggttaagccattattaggttttaataagattggcacttggattttccttctgataaactctaatctttttatcttacattggatataatgctcacttgtatattaattttaccgaataaaatctaaattgtagattacagaagactacttttgttatggtaaactgattttcagtagcatctnnnnnnnnnnnnnnnnnnnnnnnnnnnnnnnnnnnnnnnnnnnnnnnnnnnnnnnnnnnnnnnnnnnnnnnnnnnnnnnnnnnnnnnnnnnnnnnnnnnnnnnnnnnnnnnnnnnnnnnnnnnnnnnnnnnnnnnnnnnnnnnnnnnnnnnnnnnnnnnnnnnnnnnnnnnnnnnnnnnnnnnnnnnnnnnnnnnnnnnnnnnnnnnnnnnnnnnnnnnnnnnnnnnnnnnnnnnnnnnnnnnnnnnnnnnnnnnnnnnnnnnnnnnnnnnnnnnnnnnnnnnnnnnnnnnnnnnnnnnnnnnnnnnnnnnnnnnnnnnnnnnnnnnnnnnnnnnnnnnnnnnnnnnaaaaaaaaaaaactaagtactaatttaactattaaatgtgcctaatttcttcagttgaatctgcataaaacaccaaagttcaataaactttctgccaagaaacactaactcctttgtatcatataattcaatgcatgtgcctagctagggataatatatatccatttatttaagtataaaacaataaaataaaatgtacacaacataatactaatccaatcaaatattcaataacacagttttaacaaaacgtattacaagaattaagctttttctctaatagccaataggttctatagtgaatcatttctaatggttcgatcgtacaagcagatagcacaaacaatataaccataaattaaacaatttagtagggtgtgccaggcctacactgtattgcaagaaataggcgacacttgaatacttaaaccgattagaacagatactacacttgatcttagcctaaaggcggagaaaggcatgctttggttattatattgttgttgcttttatttctgttacatgttctgctgctttcttgactaactgatgtgggactctttggcgactacgctgctgttgcaaacttgcaatagtgacaatttgaaatgttagttcttctaatccggtctttcttctaaatgtgttttcttatttaggatgtgacagtgcgtacaaagtccaaacctagtttgctagctatgtgttgaatgtattaagaccttcatggaactactgcatgcactaaaggatgctatctgagaagttaaaagggataggatgactaatttagagacaactcattatattatggattctgttgctgggccatatccataccctgtgatggtaagagagtttcatgcagtgattgacaaggaaaccagaaagcaagctttggaaaaatgcataagaagccaaatgtgtgtgattgcatgtgttggtgacaaaaaaagttaggtaaggtgtgcggatttagcttggataattgcaagtatgcagcaatattaatttcagatatgtgatatatactaaaggatgctgcctcagaagttataagggatagggtgactaatgtagagacaactcattatattatgtttctgttgccgagccatatctatagtactataccctgtgatggtaagagagttccatgcagtaattgacaattgacaaggaaaccagaaagcaagctttggaaaaatggatagatgaaccgaatatgttgaatgtgcaagttttttctctctagaaaacagcttggtgtcgaacctgaacatggctttttgaaagatttagggcgcactgaatatcaaagaatgactggggaagcgttgaagagggtactatcttgtgtgaattgcttattaaaaaaaccaagtactatatttgaacatgtttaaaaagtaaaagtgcatacatattggccaggactgagtattatatttcaaactccttatttaaaagataagtgaaaagaaatatttccaacaaaggggtgaacataataaatagaaaatttaaaaataagcattgaaataaatgtgatctgttaaccaaatgaaagaaaaatcaaaatgccatcattctgacacaagccaaaccataatagaggaggctaccagctgagcaacccagcaaaatagagagagcagttgatactctaatgtagtcttccactacaattgcaaattcttttaataactttcttgacaccaaaacatggtataggtatataattttgtttcataagtatgtggggttaaggatttgaattcgatcttttatccctaatctatatgtatttaaaaatatatgttaacaacccattaaatagatctcattatatcaagaaaataatcattattttttggtattcatactgttcacaaatattatttttaatttgtttttttataatttaactcataataattttcacattcaatccacaaatgcttattacaacaaaacaatatagatagaatttaatttttgaaatgaattgaaaaattcaacctgtatttcaagattttttttcattttaaggaatataaaaaaaatacatcatgtttttatcattattatgatatttcatattccaattcaattggatgctagaaaaaatgaatttgggatagtaaagaaaataaatattttaactacttttttttaataaaaaaataaactttcttgacgaagtttatgaaaaataataagcaattaataaattaaattgtttatccaaatatactaattgcttgtgtaggtggcttttctaacataaacaaggctcgaaggtcatacgctaaaggttggaatattggtctcttcaaaattttaaaaaacaaacaaagattgcacaattcacttttacattgaaatttaaagagaaatgttatttttagtatgacatcattttttttttgcttaacagcattttatttctttattataattaatatgtatttttttacaaacagggttttttacttgaatttagtttttttaattaatacatttagatcttcggtcactttttctttacataaagttttcaagtccttgtttttatgcaaaacgttttaattttggacaaataagtttataagctattaaaataatttatagacaaattgaaatgtcttattagacccactctgaatattttttatttcataaaaaaataagaattaaacaaaaattgttctaaatataataagtacatttcttttcttttttttccttaacaaatgtcataataagaacaatcatttgcatttggaaaatgtaattaataaaaaaaaaaaaaatttaattggtaaaagaaaaggggatgaagttaattgataagatatgtattgtgaataaatgttattcgtttgaaattaataggaagaatgtatttgtttgatttgaaataaataagagtatatctgcaaattaaaaaaagtataggaagctttctcttttatatcagagcctggtttcgatccagggacctgtgggttatgggcccaccacgcttccgctgcgccactctgattttagaaattattaatatatatttcattacttgtacaatattttgtgcagagtactgttttctttctttgattgaagtttttgtgcaacgtcacatagcaatctactacggtcaccaattcaccaaacaattgcaactttgacgcccacgaatttttttgtttgaaatttattggatggcgtggttttccaaactttttagattttccgtctacttgccaaacttgtcacgacattgttgctaagtaaatatgttccttgcacgattagccaactgtgggagcagtattcggtaaacagataaagataattaacattactataagatataataatggtataaagggaatataccaaacttgaaaccttcgaataaatctttaatattctatttaaatttttttaaaaattaggctaaatagtaattttttatatgtgtagagtattcacaaatttatccccaaaaataaaaattcaaaatttagtttttgaaaattaaaaaatgtaacaaattcattaattaattaactttcattcattattaatgaaaaagtttctgacatataggaaagaaaatgtcataaaatgattgttaacatatatatttgactaaaatgctattaaattttcattggatcaaaatatcattaaannnnnnnnnnnnnnnnnnnnnnnnnnnnnnnnnnnnnnnnnnnnnnnnnnnnnnnnnnnnnnnnnnnnnnnnnnnnnnnnnnnnnnnnnnnnnnnnnnnnnnnnnnnnnnnnnnnnnnnnnnnnnnnnnnnnnnnnnnnnnnnnnnnnnnnnnnnnnnnnnnnnnnnnnnnnnnnnnnnnnnnnnnnnnnnnnnnnnnnnnnnnnnnnnnnnnnnnnnnnnnnnnnnnnnnnnnnnnnnnnnnnnnnnnnnnnnnnnnnnnnnnnnnnnnnnnnnnnnnnnnnnnnnnnnnnnnnnnnnnnnnnnnnnnnnnnnnnnnnnnnnnnnnnnnnnnnnnnnnnnnnnnnnnnnnnnnnnnnnnnnnnnnnnnnnnnnnnnnnnnnnnnnnnnnnnnnnnnnnnnnnnnnnnnnnnnnnnnnnnnnnnnnnnnnnnnnnnnnnnnnnnnnnnnnnnnnnnnnnnnnnnnnnnnnnnnnnnnnnnnnnnnnnnnnnnnnnnnnnnnnnnnnnnnnnnnnnnnnnnnnnnnnnnnnnnnnnnnnnnnnnnnnnnnnnnnnnnnnnnnnnnnnnnnnnnnnnnnnnnnnnnnnnnnnnnnnnnnnnnnnnnnnnnnnnnnnnnnnnnnnnnnnnnnnnnnnnnnnnnnnnnnnnnnnnnnnnnnnnnnnnnnnnnnnnnnnnnnnnnnnnnnnnnnnnnnnnnnnnnnnnnnnnnnnnnnnnnnnnnnnnnnnnnnnnnnnnnnnnnnnnnnnnnnnnnnnnnnnnnnnnnnnnnnnnnnnnnnnnnnnnnnnnnnnnnnnnnnnnnnnnnnnnnnnnnnnnnnnnnnnnnnnnnnnnnnnnnnnnnnnnnnnnnnnnnnnnnnnnnnnnnnnnnnnnnnnnnnnnnnnnnnnnnnnnnnnnnnnnnnnnnnnnnnnnnnnnnnnnnnnnnnnnnnnnnnnnnnnnnnnnnnnntttgcttaaagaatttttatataattaatcaatcataagttattatatattattaatttgtttttttgaatgcatgtactataaatttgttgattttaacaataattactttaaaatatacttattacatttctaatcaattaacactgtaaacctttttatactcacactgtacaaaaattgaacagaaaatttctatattattaattaattaaaaatattataaatatgagttttacagtaattataatattcaataaagttattatacacgtacgttaatttatatataaacggtagtataagaacttttatattattaatatattttaattaaatattgatattataacttataatattgaatgactgatccattttcctttcaggtgtcctcaattaaagttcagaaagtatgggagtcagttggattatgacgagttattaaaattaaacaaagtgagagcattgaaggaatttatgagttaatattcaatctcctggcatctctagatagatgttaaaagcaattttcttgttattttatggtgcatttgaaaaaggcaaaatgagaaaatatggaataatattgagcttcagccacaaatattatcagtttttatggcattgcaacacttttctgaatgcatggaagcatgcgtgaagaatcacaaaggacatcaacatgcatgaaaatgatgtcatcttgaaggagcataactattatggggttgttatttatctttgagataaacatggtcattttatcaaggtgaattctacttgttggcatcatggaattcctaaccctcgtggagcaaaagcatggcgtctcttacaaagcattgatacgatcaaaatagctaatgaatagtaggttcaaaatatataaaattgaaaagtataaaatatgaaaatataaaatataaaaataataattttaaatatataaaattaggagaataaaatataaaaatattagataattatatataattttttaaaataaagggtgcatttgcacgtctcacaataatatacatttaatagtggatatggaagttcaaaatataccttttatatctaacaatcttttagattattaatattttcagattttcacacgttttatttaaatataaatcttatttattttaattttttggtgagttttttaaaagacaaactaataagttattcactagttaataagaacatataaattatatgctagtgtttatatctttgatcatatactcaattatatttattttcttattatgaataaaatggcatatctctctttctttttttaaaaaaatattacaacttaaatttaatagatatacacttttatatataggcaattaaaaattatcattttaagtatttgatataatttttcataaagaacttgaaattcagatttttagttaaaaaaataacatccccttggttaattaatcttgattagggtccctgatgaatgacaatgtaaaaatttactattagtaataatattttgtaaaaaaattatatttatttatttatttttataaattcaaaatttttattttattttataagaatattataacaaatcatacatttttattcaatcaactagttaaattcacctttaattttaattaagataaacacgaaaaaattccaataatttgtatgccaaacaaaatagagggaggagcaaagtatgcatagttgactctcgaaaaacattcaaaagagtttcttctcctttcttcgatcgtgctcgtgccacggcgaagatgaagatagcgtggcttctgctgctcctcctcgtatcagtctgcgtaacgggctctcaagtttgggccctgaaatcgccgtttcacccgcgagacgtgcttcctctgctgcccagacaggtgtcgtggcccatcctcaaccgcctccacagagcggtggatctcctccccgtcttcgtcggcgccgcctcttcgccggacgacagtctcaagtggaaaggcgcctgcttctacgagaacaaagcctggatggtgtttcacaacaagagcggctctcaatatggcggtggaacccttcacatcaaggtcgcttccttctcaagtgtgggaatggaaatctatgtcacttctttttgttgaaaaaaaaatcaaattttatgataagcattcttgttgtaatgaacttttatttaatactaatcggtgaaggactaggtcaacttcgtttcatgaaatcttcattctgagtggttaacaaaaattggtcatactcttgaaatatttcgtagttttttttnnnnnnnnnnnnnnnnnnnnnnnnnnnnnnnnnnnnnnnnnnnnnnnnnnnnnnnnnnnnnnnnnnnnnnnnnnnnnnnnnnnnnnnnnnnnnnnnnnnnnnnnnnnnnnnnnnnnnnnnnnnnnnnnnnnnnnnnnnntttttttttttttttttttttttttttttactttaaaaaaattgcttagggagtaggtgtcattaagatttaaagagtgtttttttaatattggaatgcatagattatgttatgtggttgagttgtaatttggtggattttggttggacgtgttgtcatttgaaagcgtattacattattagaggagactaagttaagtggatttaatgtcgctcagtattttgtatgtcattagagtaatgaaactcttactcctcaaatagggtgtatggatggaaataagagagataaagagaataaataaatagagaggaactgatagatgtggcaaatgatgtgatggaaaatgaaaagagaaatatgaagaaaaatgggatagatcatagaagtgagatggaagaaaagttgggtgtatgtttagtattttcctattagtctatgcagttctataattgtattctttttatccctctctctctctctctctatgtatggatttgggattcaacggaaactgattgataattatctatgtgctgatctaggttagcaatgctcacagttggacgtgcatggatctttatatttttgccaccccttatcgtgtaacatgggattattatttcctggcccgggagcatacgcttgagttcaaagagtgggaagggaaagctgagtatgagtatgtaagtgaccatctttcttctgtacactgtcactaagtagagttttttgaaacttgaaacacacatttttgttttggagatccttatcctctttgcaatcaggtaaaaaaccatgggttatcaattttcctcttgcaagctgggatgttggggacccttcaagcactttgggaggtcttccctctatttacaaatactggatggggggagaactccaatattaaatttttggagaagcatatgggagcttcttttgaagtgcgccctcagccttttgttacaaatgtcagtgctgatgacattcattctggagatttccttgccgtttcgaaaattcgaggtcggtggggtgcttttgagactctagagaagtgggttagtggagcttatgctggtcacactgctgtttgcctaagggactccaatgggaagctttgggttggagagtcaggacatgaaaatgaaaaggtaaaatatttaagttgcattatatctattggttctgtgcaagatttattatatttcatagcaccgttgtcagtatcatatgtttcacgatacaaaggcatacgattcgatttgagcagttggtgactcaattccttgagtgaaacattttgtgcttgaatcaccccatgaatagcaggaatcacataggaattgtagattgcacatgaatcatgtgattttggtgcaagcgaccgcacaccaaagtggttcgggttatgcaggacccagtttcgaactttgaagaaccctaaaattgtttttctttacctgaaaaattagtgaaaaagagagggaattggccaattctttccctctaatcaaccgcatggcagcccattgtctccttttcatgttttctactcattcttcttgtcttctactcttctttacctttcccaatctaccctacatgcaagctttgtggtccactcttatttagggtggtcatacactcatactgctgagtttgagcagctactggttttttgtccatatggctgttaagaattggtgattttttttttgttttgaagcttatgtccctttgtaagcaatttgacttcaaaatgctaacaccccccccccaacccccaaacacacgtgtatgttttaacttttaatatgtttccttatgttaaaatgctcctatgtttatgttttttttaatgaatttgtgcttttatgtcttttttagttgtatatgttatgttttattattaatcatacagttcaatttgctatctggaaaataggccttccggttcacaatttgaatctcaatttcactaccatgtttcatagtcatttttttttataatttcattaatatttatattttcttccttaagaaaattaacatttcttgaatcctatgcgatgtttaggttttgatataatttatgaagaagtgttttaagttccttaagttaccatgtcgtcatcagaatagcaagattatgctctcagtttcagtttgaaattgtgataaaaaattactgcatggtgattaccaagttaacatatatagattttcttttatgacataattcatgatggttgtttgattgtttgagcaatgatggtaaaagtatagtccatattggtttgtcaactccgcagcggcatttggagttaagttgctagcattttatttcctgcctcaccttttgtttgcagggagaagatataatagctgtgataccatgggaagagtggtgggactttgaactgaatgaagatgattccaatccccatattgctctgcttccattgcaccctgatttgcgtgccaggtttaatgagactgctgcatgggagtatgcactgagcatggcaggaaaaccatatggttaccataacatgatattcagttggatagacactttaaatggaaactatccaccccccttggatgctaatgtggtattaattcaatcagttgttctgcttaaatttcaattcatctgtttcattagattcaactatcttgagtttttgcactattatgccatgctttagcattttttacctacaattttctagcaattgtatgaaatatttcaaacagagaattatataaaccatggctttgatcttgcaagaactcaatgagctttctacttaagttgcttgaatagtataaagttttgcttgaattaccgtaccatatgctggtttatgtatagttatccgtctgccatccagaaagaccattgctattgaagaaaatgttatttcacataaaaaaaaagaagtgatgaatgtggtatcaattattgattgtttgttttctctatcttctgccctttctgtctttttttggtttagccacatgctacatagcttaatgttttatgaatgagcatttacttttgttgctctgcaggttgcttgcgttatgacaatttggagtcaacttcaacctgaatatgcagcaaatatgtggaatgaagccttgaacaaacgacttggaactaaagtatgctgcaatcttttttcttgctccaatacacacacacacacacacacacttaaaaaaaggagaaataataattttatttcttgatcagaaaatgtattataattaatgctgaaatctcctaaatgtggaaactaggaatttaaataatacgcacagctacgcgaataattcacatgttacaaatgtataacaatgtcatcaatgtgagacaacaacactctcccacaagttggtgaatggatgtctacacacacaaacacacatacatatgtgatactaaacatttttgcttatgctagtaaattgaatcaatgtcttcaattgtctagcataagtcataagatgcttgtgatgtgatatattgcatagattagtaagcaatcagcaatatagaattccacattagtgaaaaaaagtgaaccatgtggcccttttgtgtttctacagggacttgaccttccagaagttttagtagaagttgaaaagcgtggatcatcttttgatgaactactgacgattcctgaacaagattattggacctacagtgatgggaagtcgacttcgtgcattgcttatatacttgagatgtacaaggaggctgggctatttgatccaatttctagttccgttcaagtgacagagtttacggtgagtttgctgggaagtttggtcttttgaattgcttgcaatattatagtaacttttgaatttcatcctacacaatttatacaaatgattgagcatatataatttcttatcatggttgtatagatttctaacaaaatcctttacaaagtgaaatcaggttgttgagcaggattgatatcagttcactacatatattgtttgtgtttctagaagtcaaaaacactttacagtagtatattgacctggcgcatatagacttatttttgtgcaataagtgcagataaaagatgcttacattctcaatttttttgagaacaattctagtcgcttgccaaaatggtgcaatgatggagacacggtgaagcttccttattgtcaaattaaaggcaagtatagaatggaattacctggatacaacaccatgcaaccataccctcatatgaatgaaaagtgtccatctcttcctccaaagtactccagaccccagaattgctagcagtcttcaattttttcctacaatcgaagggctgattgcgtgtgaccagattttttggtcttctagctttggatttcttaggagatgccaatgaattattgtttgtatccatttaatgtaaaaagaaattcaaacaattcgatatcgtgtatgtatttattattacaaacttgaacttatattagacattcatgtaattcggattatctatgtagccagattcaacagtgtaaatataagggacttgaatatatgtacatcatgcaaaattaactttaataagtgctatgtaaaatattttgtaagtcttgcatctgcattttttctctctctctctaaaatgggtttggcagctttgaattgagaacttcaaaaactgtactgagttgtgaaagtagcaatttcgttgtttagtgtttactccaattcagcactctaatgtaagtgttacctgcttttaccatttaaagaacatagacatttgcagatagattaacgcagcgcaatacagatatatcacttttcaaatccggtataaccatgtaactcggaacattaaacaaaggtaagttttctaattttttatttgttttattttatggtcggtgcaagagaattaatcttgcatggccattcatgtgcactgttttgcacacatttccatctttttcatttcgcttcctcttctctttacttttttcatccccatttgatctcttgctcgacctcttgctttagcattaagatttttatactctaatctaatgtagtatgtttatgctctcaattacttctctttcttgctttatttttgctctctcacaacactattaatgtctatcattttatatatgtatcaacgtatatttaagttgtcgcagcgaaacatcttttagagttgtctaaattgaagaacccttaccaattatatgttttttcacttgaattgcttcaatattgtataatttttcctttgtatagggtttttaatggtcttagactcttagtgttctacttgaattttttcatgttttttttttaacattttgtaaagtattttatgaaactcataacagtacgagaaataatattcaaaatacaaattaatactttttaacatttcggaaagtactttcttatatgtttaaaacaaaatattattctagaaagtacattttggaataatggttatgtaacaatgttatgggtataaagggtatagttgataacaaacattaggtttaaatattttttcatccctataatttaacattttttttgccttcactcttaaaatttttgtttcattttagttcttgcaattttatttttaattttcgttcttaaaatactttatatatcactttgaatagtaaaaaatatattttaaatagtaaaaaaagtgttatctaaaacactttgaggaagaaaaaaaacacattttgcaagaactggaatatattatttttttcaaagacaaaaatgaaaaaaaaaatgctaaattgcaggaatttaaacctaaaaattaagaagaagagtgcctctctaaatatgaggtcctgggtgatcgcccactttgactgtatttagggccatcattacttaggcatgcatatttgaagtcaatggttataattgatatatatgtgtgtgtatataaagaaagctatagaagtgtcttgataattctagatttttctataaagctatagtagtcacatagataatagaaatgtctcgatagttcttaagttaggaaaatgctagaataatgtataatattatttaataatccacccacatatgtagtcagtgaagtgttgcctgtaaatatggaatctgcactctgttgtagtgtgcttttttgagagatcaacacaagctcctccactattgttaagagctacactgccaattattcactattacacttctatacaattcccttcactaagtcaattattactaacctctctaaagccaacgtcaacagccattaaacaatcaatccaattttcttattcctaaaatactaacagtactagtggttatgactgatgagttgatatgggtgagaccaattttgtaggagatggaacttgctaatacttgtcctatgaaactgcggggtgatcacaaccaagttgtcatttatatcatcacatcaaatctagtctttcacaaaagaacaaagcatattaaggtagattgtcccttcatctgagataaggtccaacataaatcttatatctacctcttaattatgtcaagacagatgaccaactagcatatgtatttgcaaaagcttttaatgaagtgcatagaaatttaatttgttacgagttgggcatgaaaaacatttatactcccgtttgagtgggagtgctaagagtaaagttttagtctgtatacggtcttgacctatgtgcttgtatatacttaacctagtaatataaatattaggtaggagtagttattcattataaagtacccaattaaagtttactcatatacccctctatctctatctctctccctctttcacttctctctacaaaatagaaattaaagcttactcaatatcaggtcaatctgatacacatgaagacaacatacaccaaataaataaaactaaaataaaaatatctcagacaatggactgccatgtcttccaaactttggctggtgttatcagattgtgtttcgggagattgcatggaaagcaaaggctcatcatggattgagaaatcgacctctcttacatcaacatcaccagatgttcagggatgtcatacttttgacaaacaatgggtctacaatgccatattatacatcatcaccatattatacaggctttatgaaagtcaaagaatatgaaacacatacaacaggaagcaatttaaggaagactaatcaaaattgtgctatatattttcgttcaaacacaaagatgaaacatcaactctgctgctacagaaatttccacaattattattaatcctaacttttcttgaacaatttcaaacatgactaactatgtattcaacaatttcaaacaatgtaaatgaacatatatcaatataaacaatcatgctaattttgattcagtgttgcactgcgtggaacctaatgtcgctgattgatgttgtgagggactgaatgatgcaaccaaattctggtggtcaatgcggtgagggacggggtcttgtaaggtaatgtcatgaatacttcttctttggcctctattatcggaggactgacgaagaaaatacttttgggcatggctagccacctgagtaggagttcttgtcttgacaacctttcttgaaatgtttatccaatctcccttttcatataactcaagtccgcggagaaacaacctacatattggtataaagatttaaatcatgagagaaaaacaatgaaacaacaatattaagaaagaagacactcagagagacacaaacagtacatgtgttcttcttgagtccatctcctgtactcacgggatttccgtggaggaggccgcgagtgatgattgatctgagagcttggaaattcaacctcggctggcaacaccggaatggagatgctgtgaagaaacggagtgagagtgttattcccttgatccgatggagacgtggatagagaatgaccctccgacgagacgagtgcctccctatgatgatcttgaagctcattgctgctgttccctcctaacatcgttctcttctaccagttccaattcaacttttctcctttctttctttctttctttctctttctttctttcttcacccactgatgcagatgcagagtatgtgtgtctctgttctgttgtttcctttatatagggtttggcattagcgcgcgccaaatcctctttcctcctctctctgtctaacggctactttcttatcaaatggcgccaatgccaagagaagcaaatcttcaccgttggctaattattaaataaataagctgttattaaataaaaacaatccatgtagacatattaagattaaatatatttttggcgttacatgggatacactcgagggtatttgctaaagtttaattttagtagaagggcatcaagtccagaacttttctagatttctcgagcttctacgatcgtgaagaacttgccaactagtctagaatcataacggagataattcctattgaatatgaggcacaactattctccaaggctttaacagcatctccagcggcaattttaggtgggttgtttcttcttctttctttttttttttgacaggataggtgtgttcttgaagttaagaattgttcttaactgagttcaccattggacgaggatgaagtggatgcaatatgtgagaattattcgtatataagaatcagtctttttttttaacgaatataaacagaagtagcctttatcatccaaagctttgagcaacttatggaccaatttcctcaattcaaagttgaattggttattagacaagttaatgtagttgtccatttgcttgcaagggtaactactgttaatgttagttcccatgattataatcatattccttattttattcggtctttcatcatcaataatatgagctcattccgttttatgtataaaaaaatcagttattaaccattaaaaataattaagagatgactaattagacccatttaaaaaaaatacaaaaagtgctaacttgtgagatctattttaacccacgttactattgaagatgttttaacaatatgtttataaataaaatttagcttggtactcaaagctataaatatatttttcctggatttgaaaacatatcaaaactatttttctcaaatttgaattgtggatataccgcaaagagctcatgtagtattttcatttttgagcaataactagcttattttactnnnnnnnnnnnnnnnnnnnnnnnnnnnnnnnnnnnnnnnnnnnnnnnnnnnnnnnnnnnnnnnnnnnnnnnnttagaattttaaagggaacttagaaagaatcaaaatcaaagcaacaatgaaaaacatggaaagatgaagaaaatgagaggaaattgggtaattcggtaggaagaaaggggtagagacactattttctttctttttattttttaaacttaggacttatttgataatcctttttctaattttgaaaataaataaatgtttgattatgtgttttttatcaataaaacttaacaacttttttatttaattcttattttgttttctaactttaaaatctgttttaaaacagcctcaccaaataaactttatctcccttctttttttcaaaacacaattttcaaaaatgattttacaaattatattttaaagaattttcatcacaagtttaatttcatggttagataagcacaacaagtattagctaatgcaataagcaaaaatttaattcctgggaggcacgcgttagaacctgatctagttgttgacaatgtaatttattccatatttaaagtagactcacaccaagaaatgtaaatttgttgaccagtcaaataaaaaggcttgataaatttcaattggaatttccatcgagtttgtcgagtatgcaacaaataagagccagttttgaatttaagcaacctcagtgataaggtgtgctaagctaagagaaaaaggaaagtagaaaataaaaagagctgcttagagagtgatgaagtactggcccaattctcctacgtgtataaagacaacgacaacacaacattgttccatactttgaaatcactaaagtacaatgatatatcttaaccatctaaggcatgcagatcaaccaacatatctgtattatagtaagcaaatatatgatatatcattatatcatcactcagccttggtggggagatggttgccgccagtcgctaatttgtagagataaaacagagtcatgagagcactgcaagaaaaagacagacaaatatcttaactccatatacaaactacaggtgactgatgtggagcaattggacaaactcacaaaacatagactaagtaatggctgccagtgcttgattcctgacttcaaattcagaacataatatatagatcttcaaatcaggaatgggaagttaaaaacaaattttagaactagcagaaaacaagttcaggataatggcacataaaaatatttcttttattctcaacataaatgggaatggtgaagccttgatcttttaaaaagagtttaaagaactttcatggatgcatttacttttaagaaagacaagttcaaggatttataatctacaaactaacaacttatccaacaattaaaacttaaaagtttaaatttagttcttacaactctgagagtaaaagtaaaactatgtttacaatgagtttgggtacttctaatcaatcctttgattacctgattccagcaacaagaccagcaggcataatcttggatgtttccaaatatcgctgccccatgacccaagttagtatggctgcacaagctgtttcacagtatacaaattagaaaaaaaaagcatagaaaattactccggctaatatggaccataattaactcagtgatcatggcttatcagattttatttttttttatccatagaaatcgaagacaatgtcagggagtttacaacaactcatgcacccttgctcaaccagagcaagacccccttaatatcatagcttatcaaatgaatacagagtaacagacatacattccccgtataaacacagagatactcattgatcctatatatattggtagtaatttagtataacttatgacttactaaaatattcttgcttaattttgagttttgacatatgataatgcaatgtgatacatctatacccctgctagagtttctgtgcatactttttattactaagtaggagcaatgcaagtcattaacttaatgataataaacttgttatattcataagcattttaaatcaaaaaaattctgtcaagaaattttactttcaatcgaataatatttgttacaaacacatccccctcctttgatcttttatatttatcattatattctaaaacatgggcttatattcaaagctaaagcaaaaagctctagttatagtcttgtaggacaaaccatgttccacttcatcaactatactaatgacaaaagtgtatggggcaagatccaagtctgataaataagcaatggaaatttgaaaagcatgcacccaatatatcttgatcaggttacatacattcattgatgcttccttggcattcaatattgtgcacagacaccctctttcagatctatgtatcactttccctccatcaggtagacaccctattaacctatcctaacctaacctaacaaatccccttccttttaatagaaagtagtaaatgaaaaagcaccatcattcaatatctttgaaacccaaagagcatttaggcagagtttcgataaacatttcaacaaacagctaacgcaaatccagagggtaaaataaaatagatcagacttctcccacaagttaaaacaacatatgcatcttaaagttttcataagtcgatacttgagctgcattattttaggagaacatggaattactaatctaaatatcaccatgacatcctaagagagagaatccaaatccagaatttcatacaatccgaaaaaatgaatccaataaatatccacatctttccatcaaataacaaattctagcatagaacacgtttcagatccagaatcatcgagagccaggtcaacaatcacacgcaaaataataataataataataataataataataataataataataataataatgaaaggaaagaaattataggataccagtctcgaggaagagagcgaggtaagagttttttcgtttgccgaaggcattgagactgagatagccggcgatgatgagaagcaaaccggagccggcgcctccggcgagggaagcgatgctccctttgcttatgtaggcgaacagtccaccacctactaacatcaatccgtacggaatcgtgaagcagaaatcgtgcatttttctctccttagatgccttcaatcggaagaaagattggaactggtaagtggcgatgggagcttgtggaatgcacaagtcaaatattaacaccccacgaaaccctccacctgctccttaagaatcattcccacaatctaccgtctcatttttttaaacttttatgttagattttttcaaaagaaaattcattttataaaaggagttttttttttcattaaatcttaataaattacaatgacacctatttggtctaagggcatcactaatccaagatacctaagaaactcaatttcaatatcaggaaatatataaaatcatttatagtgatcccaaaatgtcatcatttttaagatactcacatgtaaattttctcaagaaaacttttttaggaaaataggttttaagaaaaacaaactaaatagagtagttttaaaattatttatatgttaccggttgtcacttaggataagttgttatccaaatggtactttgtgttaattttttattttgtagtatataagaggcatcgttttctaattttggttatacacttttttatatttacaacatttaaaaataaaataatcgattgtagatataattaataaaaaaaatatatattgatcgtcatgttatataaatagttttgaacataactctatttataatatataagtaattttttaaacctactttagcaaaaaaaaagttaaaaaattcacggtattatattttttaaatttttatttaattatgtttcaagttataacaaattatgacacttaaaagtctttaaatatgtttaaaatcttttaaataaattatcaaaagttattgatataagtgatactaaacttaatcctttttaaataaggtattcaatttgagacttgttaatgaataatatttgattgagaggaaaaaaatttaattaaagacaattggttaaatttttttgataaaaattaattattattaataaaattgataaatactaataaaaagataaaaaaatttatccaaacaattttttacaatttttaacaaaagaataataaaaaatatcacgtcatcacttacaatattaaactcttttggaaacaaagaaaggaccaaaatattaaaggaaaaaaagtctggaaaccaagatccaagacccgtttccgaaatattgaaagataaaattgaaaaaagtttaggaattaaaaatattgtttatcctttaaaattcataaaaaaaaataaaaatccctattcaaaccgttttagggttttgtgtagcagcccaagctaataatggtggcttttcttggtacccgaatccagagcatcacctggttcaggttcaacccttcacacaaccacaagctccttccgcggagagccctggagatttcgatgtcgacaatgcaacagggccaatctaaaagacccatttgcccttcttgttccaaacccagccgaacgtgtctctgctctcgaatcctcacaccgggtctccaaaattctgtgcatgtaaccattctacagcacgcgctagagcgtaagcatcccctcaattctaccagaatcgctatattgggcctcaagaatctcaccgttgcaactgtttctgatgttaatttcgaagcccggttcctgattcggttgttggatccgaattcccattcgggtcatgctggaaatgagccaactgcattgttttctcgtcagtgttgggaaattggagacacccagaaattgctttctgagaaagattctaacttgattgatactgatagtgctggaaaatctggtttgagaaatgatgttgaagatgttctggattctgcttctaatgcagaagttgtgatacaagtgagtatcagtgatggtgcagtggtgaacgatgaagttgagaaaaatgtaattagtccaaagtgtgatttagctagaggtgtacatgaagataatggagagctagctgttactgttaccattggcaaatatggtgccattagctctttgtctcatatttggatgactcaagcacaatttcaatcccccaagttaagctttgacaatattttggcgtaccctgaagcttgtgaagcactctcaaaagggtttttggtgaagaagtttcagaggaagcaactgaatagggatgaagaattggaagaatgtgaagaatttgagcttgaggttcgtcctggatcggtactactatttccctctgataaggctgttgatgttagtaacctggatgctataggttttgaggtgaagaacttgatagttctggatggtacatgggctaaggcaaaaagaatttatagtgaaaatccttggttgaacattttgccacacgtgaagttggaagtgaacgagacaagcttatatagtgatgtgaggcatcagcctaaagctggttatttgtccaccattgagagcattgtatttgccctgaaggcagttggggagttgaatcatgagggtttggatggtctcttggatacttttgagtccatggttggagatcagagacgctgtaaagaggagagactgagcaaacacttttcctgttgaggtcctttcttcttttgattgaacaactcgaagaagttgcttcaacccaaaatagaatctatttgcaataaattatgaaccatgaaccttgtaagagttttttttgcctccatatcctttccctgcatgcaaaacacaacatgggaatcccagtggattatctgtataatgatatggatggagaaccccactccaatgagtttattgaaacttagcagattattgctgtgccacatctgctgaacgaggacaggagcagtctgagataaagcaaccagttactggttgaaatatgctaagagggtgggaatttgtatcgatgttttagcacaattatatttttaagattggacaatgcactgaatgatgtctttaaaatcaagacaattttgatgtttgtagtgttactactgctacatgacctgacctacatgtttacactgaatggaagacattatgtggattgcatattgctagagtctctcctcaagaaagaaggggagagcatgttccccaaggacttttggacagaatcatggctgctcatgcttgctgatttcaacttcaagccaagagacgttgcaagcatcaagctggaccattaatgattacagaaacctcagcagaaactgacactgctaaagttacccattttctaaccacttgatgatgatgtgaaatagagaaacaaaacaacatggagaaacaaaacctaaaagagaggaggaaggggaaaaatgttacctgcctaaattcaacagatacagatatttgtttagaactcagtttgtattcacactttataaaatcactgtgatggcataaatgtaattagattctatttagcagatttcatgtgttgatgtatattggataaatcagtttcagtacttcaagacagaataggccaacccagtagtttccacttaatgcttaattatccactctgctgtttttaccgttctattcttagattgctgatttacattctatcatatcccatttccctggtatcagcgaacaatgatttcagatttaaggcattttgttaattagaccttcgtgcatcccagtaatcttcatggctttactcgttgcatgactctagaatcataatctaaaatctcaatgtcagtcaagaatataaaacatacatgtttatttctggttattaagtacgctaagttttagttttcctatatagaaatcagaaaccaatcttataagttcagacaaaacaagcaacaccatcaattgcaaagtgataactagccttatacctcagtttactcactctgctgctagtagtgatacaaactaaactaaggacttgtctaatcatcaatatttacataacttttgctaatccacgtagttctgagttttagggcgtcaaaatgtcttctgatcaacgcatcttgagctggccaaagaggttatccagatatcatcagcttttactggttcatcatcatcattcctatgccaactccagaaggcatgagtggagtttacaatcttcagctcaccatgaccaaaactggcttcacggaattctgaccactttggctgtgggtttatatacctgtcaacaaacaattatgtaaggatacatgcagcaacaatgacggaaaaacaaatttcaggctgcatacatgataaacctcaatatagctttttttttnnnnnnnnnnnnnnnnnnnnnnnnnnnnnnnnnnnnnnnnnnnnnnnnnnnnnnnnnnnnnnnnnnnnnnnnnnnnnnnnnnnnnnnnnnnnnnnnnnnnnnnnnnnnnnnnnnnnnnnnnnnnnnnnnnnnnnnnnnnntgataaaactcattatagctttttttttttttttttttttttcacataacaaaggattcagaaaacagatttctgtgggatgtttctggctgtgaaacttacttatgagctaagccttctctgtttcctccatcaccaatagttatatggacagcaccacagggatccaatcttccattatacacacgtttctgacaatgagatagagtattaaaacccagtttcaactaaatggtgcttacagagaaaataaaatgctaaaccataaagacatactgaacgttcataagcgtgaacatgaccagcgataactaaatcaacactggcagcataaagcaatggctccatagctgccatcatatcatcccctgcaccttgatgagccttgttactattataccatggcacatgaaataacacaagcagccaaggtgtccttttcctatctacctttgacagatcttcctgtagatgagggatgagtaaaaattaaagagtgaaaaaaaaagtggtccaaactccaaagtacttttctttttaaaatgatagagtagtgtaaaaaagacaaataaaaatagtaataacaagcatgattgtgtagttttccatggtcatgaattgcattacacttatccaatttttagtaactcttgatcaataggtgagatcaactaacctttagccatctgtattgttcagagtacacatcataatctgcataggagccaagcatgataacgtgaacacctgcaacttcaaatgaataatagagatttgaagttgatccactttcctcagatggcattttccatctggaattataggacacaaactcatccgttaagaatagtatgttctcctcttcatggtttccctctgtcaccatccacggccttgtactcgcaagcggctccacaagtttcccaaaattgtcccacagatgctgcatacaatcagcatatgaaaggtctcctggtagcaggtagacatcatatttacattggtctatgtgtgccagtgttgatttagtccaaccagtttgacctagatccccagccacagcaaaagtaattggaaattgagctggaggagttttgagctcaaactcgggaccttttccaccacatcggtagaagtacacagtattgtcttccaaagggccaattacggcatggtgtatctttcccgagctgtataacagatagttataagaagtgtactctccttcagctattgagtcatatctcccaggcaatgttccgtattctacatatgaaggtgaatgtttatcatcggttatccatgtaactctcatgtgcttgtctcctgccaaagaaatgtgtacctggaacaaaaatttggtatcaaagaaactgaaatttaatagtcaccataaaagaacatgcataaaagactaactaaagaggctgatatgattgcttaatagaggaagcacggttgacagttcacagaatatttgtcctagaattggcaaataattcatagaaagcgaaacaaactgttcaagttacataatattagctgataaataataatcattgtctgtacagatatatactataagaaatcaccaaccataacgaattaaaaatgtcttttgaagatttgtgactagaacccagatcatgaactataaatccaatacaagagtgacagaaaattattggatcaactttgaatttcataaccaaagaaaccgtgcagggctatatcttgaaccccggagacatgctcccatcgtcactgtcttaaaaatcatatcaaagacgatttctgaatgattaacaatatgattttttttattctacgtagaaattaaagtcaacaacttgaaatagagaataattttgaaaatatcaccctataaaaaaaaaaaaatgaaccctcccaactgaacaacataatccaatcaaaatacgaaagaaatcaggtactgtgagttgatcaagtgggaaataaataacacaaagtgggtaatgatatagtactatatatttatgaatatgaacatgatgaatgaaaaagagtttgattgacctgttgagggtaagaggagtgggccttggaaattgaatcccatgggatggttaaggttttacgaggaagagatcgaacgtattcaggcgtggcaatagcaaaaagaagcgttagaatcagaagcagcagttgttgtttgagttccatgataacagtaacagtaactacctggctgagacagcaatgtacttccgcttcaatctttgtttctatcatcacccatcctcatgacatcaccaaatatgtcgttgcctcactttttccgctttgtttcgtagataaaacgaaaccacgctttcataattttcttaacaattaaaatatatttttagttttctatgagttttattcctttaaaatctgaaatcaatattttttttttgttttcattgttcatttaaatataaataaataatatttgttaatttaattaattttctcaatactaaaagaaaaaatgttaagaaaaacatgatactataccatacaaatatatttatttcagtttaatttaaacaaaatcactgaataacacaaataaaatgaggaaatacaacataaaaactgcagatgtattaaattaggattttagaatattagtttggtataataaaccttttggattttacaagactttggatgaatgtagtgaattttaagattttgtaaaaatatttttatgattaaaactttgtagtttgaattttaatagatttataacatattaatttataaaatttgagaagattttatagatttacaaagttttaataacttcactgaatttttagaaaacattataggttattagggtcaataaaaaaaatgttactgtttagataaaaaagagtgtaaccaatataaaattttccattatattaatagttaatttattctgtcttcccatttaatgtttcttcacataatttattaagcctatctgtgataaaatcttcttgtttatgcaattggatttgaaccaaaaatttaaatttatgatatttgttaattgataatactgaaaataaagaatcatatgttaattcaattgaaaattcattatcataatgnnnnnnnnnnnnnnnnnnnnnnnnnnnnnnnnnnnnnnnnnnnnnnnnnnnnnnnnnnnnnnnnnnnnnnnnnnnnnnnntattatgtgtgattaaataaaagaaaagcctgatcaacaataaaaaaagaaaaaaatattagaaaatctcaagagtttagtgtaataatttgttgagtgttatactaaaaaaaatcttataaaattatccaaatttatgctgaaaaattcataaaaaaactgtattttttttaatactatataaggcttttttataagttataaaaattattaatgaagattacaaacataaaaatgtccaaatccatcccaataaatcactatcaataacattacgaacaatctcctcactgttgagagtttcaaacttaatcatgtgggtgtgcgcataaattatccatgtgcacctatgctggacaaaggtagagtcttgtccttttaatatagtattgggtccattgactcaaattttatttccattatatttaactcaacattagaaaacccaattttctaatatacacaattctttgatgaattaaacaatattgctttgtatgtttaatatattttggtgaagtttgtctaactgtatatttggttaaagatatgaacttacattttagaaaaatacgaatttagttaatttgctaattatttactcaaattgtatgcttctttaaagaggaagagagaaaaaataaaaagaaaaaatagaagcaatatttttttttaaaaaatgagaaaaagcataagacaaaatgattttaagatttttttttctttcaaaattccatgtctttcatttttcttcttcttaaattcaaaatttattttnnnnnnnnnnnnnnnnnnnnnnnnnnnnnnnnnnnnnnnnnnnnnnnnnnnnnnnnnnnnnnnnnnnnnnnnnnnnnnnnnnnnnnnnnnnnnnnnnnnnnnnnnnnnnnnnnnnnnnnnnnnnnnnnnnnnnnnnnnnnnnnnnnnnnnnnnnnnnnnnnnnnnnnnnnnnnnnnnnnnnnnnnnnnnnnnnnnnnnnnnnnnnnnnnnnnnnnnnnnnnnnnnnnnnnnnnnnnnnnnnnnnnnnnnnnnnnnnnnnnnnnnnnnnnnnnnnnnnnnnnnnnnnnnnnnnnnnnnnnnnnnnnnnnnnnnnnnnnnnnnnnnnnnnnnnnnnnnnnnnnnnnnnnnnnnnnnnnnnnnnnnnnnnnnnnnnnnnnnnnnnnnnnnnnnnnnnnnnnnnnnnnnnnnnnnnnnnnnnnnnnnnnnnnnnnnnnnnnnnnnnnnnnnnnnnnnnnnnnnnnnnnnnnnnnnnnnnnnnnnnnnnnnnnnnnnnnnnnnnnnnnnnnnnnnnnnnnnnnnnnnnnnnnnnnnnnnnnnnnnnnnnnnnnnnnnnnnnnnnnnnnnnnnnnnnnnataaattttatatatctctaatatatttttcaaatcataggatacattttacttaataatagattgtaattatatttaaaaataaaattattagagtatgagtatgagataaaattttaattattttgtgtctgatcaacatcaaaaaatttatactaatgaattattaacaattatataaatgaatttaataccatatcttaatttaaaattttaaaactcacatttataagtatttttttcatttatataatatttaacttttttatatttattcgatgtgagacttctacctatacttatatttcaataaaattttataattaaattaaataacatataaataaataaaagaacaaataaaaaattaactatttatttatatttaaataaaaatattgattaaagtggaccattattcagcctattatttattagagagaggaactacgtcgtttaggaagggacattaatggttggtaaacacaaaaaccctaaaccctaccagcagctcagcgcgaaagccgtaaatcaatataacagttcgttctctcacactcttcacttttaagttcttctgcagacagcaagaagaagcataagcagaagaaccaaaactgaaaccaaaatcaaacgtttaagcttcgttttggtacgaaaccctagcaatggcgtcctccatagcgtcgcaattagaagctatcagatccttcgccaaaaccgactctgaccctctcaagaggccactcactcgcccttccatcttgtatgatcccaaaaaagcggctgacatctccaccgaggctattttcaccgaagctcttcgaggtcaatcttctcatttttaatttcgctcttttcaacatagtgcaactaaagcaatccagtaaaccgaattaatttctcagtgattaacatggagcatattcttagaatgtgggtttggacctaactcaaccctaccccaaaagctagctcatagggtgaggattatcccccacttatgtactctatcttgacactatctctacacaacgtcggacttgggtttttcttaatacatatgaattacggtgctactttatattctattttcgtttgattttgttctgtttttcttatgtgatgcaatatttcaggcttagagattcttattggcatggatgagcggttcaggaaccataagaacgatttgtttaaccacaggcgtatagagttggatagagagttgatgggaatagaacagaacaatcaacttaatgtctccattgcttcatacttgaaactactttctggatattttcttcatacggccgcccttcaaacgcttgagtacttgatacgtagacacaagtgagctttcaacaatgtattatgaattgttttcttcctaggggtgttgtgttgataatcacatttcgcctctgcctagtttaccttttttgtgatttttgatgtggttgttttgagtttcaggattcatgtatacaacaacgaggatttgattttgtgtgctttgccgtaccacgacgagcctgaatttgttcgaatagtacagatacttgatacaaggttaggaagatattattatgtgtttttggtttggttgtgatgtagactactactggttggagaggcttctgatgtttctgttaatttatgtgaaggaatactaaatgggggtttcttgatggtgtgaaagcctctggtgcacggctgcctagaatggtcatagtgcagcagtgcatccgtgataagggcatattagacgctctatgcaactatgtgagtaattgttttgtgtttagttgtgaatgtggaagttctctagtggaatcaaataattatatggctaaggatttggtttcaggcatctccgtcaaaaaagtctcgaccttcaatgcctgcaattcgcttttgtactgctgttttcgttgaagttttgggtactgttgtgactgttgatgatgatcttgtaaagaggatacttccctttgtgagtcttcagcctggcattaagggggtttcagatcacaaggttagcttcctaggaaattattttccatgtattaaattttaaaactgattatagttgggtatcatactgtcatatttttgtgattaccttctcattagtaggcaatgtaattgctatcaaatggtagactgcgaaataaatttgctctacaatatccaccagtgtaatattattcatcacagataggaatagtagtgcataattttttatgttagtatagtcataaaatatgattatatgactgggtgaccttacttttagtgcttatttgatctgttgaaattatggggttttaggtatagagggagttaaagaagagaatagaagctttgaatgatattctactgattatttgaccttactttttatgttggttgtggtgcaaaaatttggagaaaggctttcacatgcctttccacgtttgggcttgcaaccttagggatattttttgtaagcaggggagagtttaatctctctcacctgtctggggggttttaggtccatcctgtttatggcacctttattcatgttttctatgtattagtgtgccataggctgggttttgttatcatggactgttttctgctttctttttgtatctatccttttttctcatatatataatatatacttttgctgatcaaaaaaaaaaaaaaaactgattattacgatgaattgccatgtcttggatggtatattcatgaaatccgaagtactaacccttatttatattaatcatagagcaatcctgagagataatggaagtataggaagactaatcctaaaacataatctaagatactctaacatatgataaaatattttcacatattccaacaatatatgtatacttgtgtatttgagctatgtttcttggctccctctcctgcatttttttgttgtcaaattgtccttatttacaattagcagctggaagctcactttcttgtgctttcttttttggttttctatttgcaggctggttctcttatgatcattggtttgcttggaaacaaaactgcattagctcctaaacttttgaatagtttgatacgtttggttgccgagattgctcgtcaggaggctacagagttgacagatctccattggtttcggttgtcccttattaccttaattagtcttgttcaggtactagtgtaatcctgtgtgcttgtgtatggtttaaacggaggcattaatccttttttttttttgggggggggggggtgtaattggtatttcatccaatttcctttcattgtgcaatatctatttctgaatggctatatttttattttaatttgttctgttggaattttcttagtctcaaaatgttgaaatactcccattgaaggccttggagatattaaaggaaataaggtagtcttcctcgaacttctcatcatatgcataatcactgtgctttgactgttgccttttctttatttatatttatgatttattaaatcccttttcatatagggacctggcaggggttttattagaattatctaaggagttcaatatcgaaaagtttctcctcgtgcttttggactccctgattgactgcaggtgtgtttcctatgattgtctttcaggagatatatgctttaagtcatatcttatagaagcttgtgttttatgctgattataacaataacacatttgcagttcttctgatgaatactgtcagcggactttgctatccttaatagaaaaagtccccgtacatggtcttgtttatcatgtggtcaccaagatcctttcaaattgtgtgaaattatcacaaaaagttagcgactcaacttcttccatgtcaggtgtgtaatctgattttgaattttagaatgctgatcactatcctgtaccccaaattatatatcctggtgtgcttcataaggttgatctaataattcataccaagagtgaatcaataaatttctaaagaaaataatatttaatgaaaatctcatttggtgattgagaaatctcatctaaacttctgtaaaaaaattgtttgaatacctgtgtgaaaatgttcttctgaattctgaaagcaatgaccatggatgcattttaagttacttggaaatttctttcaccatgaagatcttactttgtgtttgtataagcttattttggaggcgaagaaatttttttggcagcttatctggaaattatttcccccgacacagaacttttcaaacatgcaatagatacatgatattaaaagtggtctacttagcagttaatttgttttctatatcaatattatgtaagtaataaaatgtttgtccagactgtataaatagtaagaactggtgtttgaaacaccagaacaaaagcattgcattataccgaatgctgtcatcactccatttctacagtatgaaaagcatttctctattaagagccaaactcttggattacgctggttacaatgccttgttttcaaagaatcttactccattctttaacagtttaaccctgtgttgaaactgataaaagaaaattggaatttgatgttgaagtctaatgtgtgccttcaggaagggaagttttatttgttaagaaactacatactcttttttttcaactgtaaataaatagattaataaagaaacccagagaccatgaaagatacttatgaagacaggaaattgcacatactactgtcctatacattaatgctgctaacaatccttgttgataccaactctgttttggccaagtttgagtgtgaaactgctttaaagcagttgaatatgtgatttaaaacaaatttggtgtgttgtaaacaaaccctctaatgaactagatatcttcaaattgtgtatctcactatatggcttaagatttgtctatgtgtatcatgcatgcatgttatgtcttcattagtcagtgtactttgttttacttgcttcagcttggaaattcaaatttcttttgaagaagtttcgttgatttctgtgtaaattattattgtcaggttttgctcctgaataattttgttttcttttcttatggtgtttttttttttaatcatttagctccatatggtttgcctttatcttttttactagaaatctacaactagtcagttatcatttgttgcctagcttattattctcataatgttggttnnnnnnnnnnnnnnnnnnnnnnnnnnnnnnnnnnnnnnnnnnnnnnnnnnnnnnnnnnnnnnnnnnnnnnnnnnnnnnnnnnnnnnnnnnnnnnnnnnnnnnnnnnnnnnnnnnnnnnnnnnnnnnnnnnnnnnnnnnnnnnnnnnnnnnnnnnnnnnnnnnnnnnnnnnnnnnnnnnnnnnnnnnnnnnnattttgttttcttttcttatggtgttttttttttttaatcatttagctccatatggtttacctttatcttttttactagaaatctacaactagtcagttatcatttgttgcctagcttattattctcataatgttggtttgccaaatgttgattagttgggtgggcaaaaaagattctgtttgttgtcaatacaaaatacccttctgaattacgaggtgctgctcatcatttccttcaggtatgctgatgagttgtctgcttttttgttgttgtcatgcattgtcagatagtatataatggcttgaactttgaacatgttcaacaggataataaaggacattctaagaaagatgattcattgtataaggttttatgtaagatgttggatgggagtatggattcgtcacttggtatttcagactcaaatatttggttgggcctgtatcatccaaaggtatcaatcattgacctattcttgattattaggtgtatgtaaatataaaagtatgtattctcctgttcaacaatgataatttttttataattgtaagagcttcatgatttatatttgatatggtggtctaggctgatgttcgacgtgctacgctgcttgatttaaataattccgttatcctgaaaaccaaggcagttggttcagaggtatatatgctccgttaatcttctcgtcctcccaaaacctcatgtttccattaatttgtatttttttttttatgacaatgtttgaagaacatctttgatgtgctccttttggttggaaaaaagttgaaacttcttgcttgatgtggtttatttcctttatatatctgtcctcccaaaactgcatgtttgaaatttgtatttttcatttatgacactggttgaagaacagccttgatgtttctctttttgggtggcagaactattaaaattttgcttgatgtgttttctgttttgcacacacacataatgagggattgttttctgatgttgaccttgagttttattatttgtagtttgggcttggacccatgaatagctactgtgcttagggaccctaaacctatatatttccttgtaatctgagtacattgtaacgagtgtgtgaggaaaatatagagaatagttagacgtagcccacattgggtgaaccagggtaaacactatgtgttattttcttcttccttttcttctctttccgctctctcgattgttgtgtgattgcttggtaccaacacttacatcattcagtaactttttactggataaatttatcccgttacccattgttggattaaaagttcctatcatatctacagaattttagattaattcaatttttttatacatcattcagttcttcaaaattaatgttatatatacttctgacatataaaatcaaacccattcgattttcttcttattgttgttcatattttagaagatttgacatagataattttggtaatatataattataattcaatagttggcaaaaattacatttcataatgatgtaagagtaagtgtgatttacaacggtgtaaattaattcctctttaagtgtgtgtaatttctgatggtggtggcatattacttctctttgattttttatttttatttttaggaaatggttgcattacaaaattttgctgtcaaactagttttatttggaaatattttttgatacatttaagttccattttgaatgatttgaactgagatgcatttgtgatctaatttgtcaaggccactgattttacacattgttggtgagggagggtataattgatttttgttagaaaccttcatttgaaagagtaggtgtacaaggagggaggagtatatatccctcaaaagccacctcaacttcatttgaaccgagccaggtaataaaggcttagcaaaaagtgaagaccacagaactcaatattaaacctgatatctttacaacactgtcaaaatgcaacagtgaaacccctctgtaaactgagccttgaaccacgatgaactcaagggcacaaatctgtccaaaagaaagtgtggtggtggaaaatgctataaaaatttattgcatcatgtttcattgtcaaacacaaacaccaattgctagtaagaagtactcagtaccaatggtaccattatttagtacttggtatgctataattaattatatttataagccataaattaattgattatcacgtgggttatgctgtttttatgtgaaattatgggttgatttcatgttgacttagggaaatctttataatatggtcaaagttcttgctaggatgtgttaatactgttttgccatattcaaagtcttcaacctttaactaaccccaaaagtcatcttttttatcagaatcttgtaagcatccaagaggacatcttaagacagcttgatgataaagatctaacagttgttcaagcagctttacgtgttgatgacttgcgaaatgtaatagattcttctaagcttcttgatgcactacagaatgtgctaaaaagatgcactggcaaactgctgtcaggtaatttgtggtatattaaaaataattagatagatatcatctttattgtttctgcatgttgtattgaagcaatacataccatgcatcgatttatccataaacttggacaaggaatttgttctttgaatgcattcttgatggatgatgattgatgactgttaggggatggtggggttacgtgcagaatacagatgtggtctcataaatgtctaagcttccttaatgtgtttccaatggttcaaaatatgcttatgcttattcttctgtgtattttgggattgatttactctgttgaacttatattatttcccttttctttttgaagagtgtctgattgtccatttttatgtttattttatcaaaatatgcttttactttatgttgactagatacatataagcatataaccttcatttcatacacttattccagttgtgcttctgttactggagtatatttgtcctcattaagttatggctagttgtttcctgtctttgacaagtaaacttatttcagttctgttgtaaccatggataaggatgaatttggcttcccagagatgtttgtatttagatattctttaaacaaatggtctttgcttggttccttactaatgattcattcaacgatgatgcatctatcccaagattgggtgggaggattacataactgaataaaaaaaattatgctcttagttcactgcatgtattatgcacccattctcttcttgtaggttcagctgataactatagtctaaatgttgaagttgctgtcacttgtctaaagaatgccatctcctacttcagtgatcatgctgattacttgaagaatgttgctgctatgatttttccattactccttgttctaccacaggtagtggttaacatcatatttaatatttgtttttcggatagaaaattaatatattttgatcttgtacttatttaatagcttttagattttcccgtctctgggtaattatcaaataaccacttattttgccatgcgcagacacagagcttgaatttaaaggctttgggacttgtcaacaaaataaactggccactttatcagaatattgttgtatcttcttttggagaaggggtaaatatctactttggaattagtttgctataaatttaacgtacacttacaatatgaagaaatttaattatgttgctcaacaaggcaaatttgtcaaactcaagatcctataaagaattttccaaggtgaactgaagatatgaatcaagcattaggtcctgtctcctttggaaaaccaaaactttgaaatttgaaatgcacattttttacagatattatatagggaataacccaattgcaccatgaatagtacatgaacatgatatgttactacttactagtagtacttgtagtgtgggttttctaaaaagatatttttggtttcatcatatttctaagttgttaatcagtaatcacaacaattcatgaatatgtttatgtcagatgaaattgtcaatcatcttttactttagtgactcttgaagtaaaatcgcagacattgatacctggaagtttatcttcaattaacttgaagactattgataacatggctaagaatttcatggtccatcccaaagagcatatagcttggtttgttgaaagctgcagtgatttggagttgtcaaagacactcttcttttttgttcttttgcagtctcttttgataaaaccaaaaggtttgttttccccttctctttttgaattccattttaatatttttcagaaatagttaataatcttatatcgtataatgactaaaaacaagtaatgtttgaacaaataagctagaaataaatgtttgaagcatatcttatacatcccctagttgtacttttgtcttctctattagatttcttagccaaaaaatttcaagaggggactaaggaatgataaatattgactttttccttttgatcaaagatgaagacatttgtgcactatttgaatgtgtatttcctattctaaaggctgagtgggaaacgtcagtgacagctggtgatgtctcattggatgaggtacaaaggatttactagcatatttgtgcttttatttcattatttgtttactttttttgtaatgagaagctaatgttttacttctgttttgattgttgggaattcgggttgttttgcagttcaagtctgaagtgttagactgggattgcagtgcattctttaatgatcttttgtatgtcaagctgagccatcttaatgtgaagcttatgatttgcatattttggaggctagcacaactaatatcagtactaacttctgacattctgcttgtaagtaattcctttactatttgtaatcctgttatctattgtcttatgaacttgctttccttcttggaatttgttgttgttagactctcaccgtcaacattggttggatattaacctttttcaaaatgcagcatgacgatgataagtgggtcagcaagataagggatctgtttgtattttttgcttcatctaaattgaagcaagcattccatgaacacctccattacttagcagcacagtgcagaatatcacctccccgcctcttatctaagtttttcacagaggaaggtgctatacacttattccttttgtttgatttttcccatattttacttggccaatgttgtgttccttctactgtgaaattactgcctgtgttatggtgtagaaaatgagaaagaaaattttctgaatgtacttgattgtattttctacccagtagagtgaactgtttatattcaacaatattgcaaagataatcaatgccgaaacaatttaacaagagaacaatttagatgccactacttcctaagatgcattgatcctgactataccaagtatctaggatacttggaaaaataatcattaaaggagctctattctcctaaaatgttcgtatttccaagggagagaatagaactattttttctgtaattatcatgatctctcatgcataataatgaatacacgcagacacacatatttgctgtttagaaggtacaaaatttatatttgtagttattctctttctatttccattctttctccttttcctattctttttactccattttcaattattttgtatatccctgataaatccttccatcccccgttaggggcattttcatcctgaccaatccatgtttatgtgttaaagtggctgttttgtgttaggctttctgtatcctacgtgtttgacttgtattcagtcagaagtaagctgccagttgttagttagagacagttatgggttcactctattgtaacagattcagaggtgatacacttttgaatatagtttgatttcagatctagaacaatctttttctctcaaatctctcttgccaactttctctttggttcttaaaatctaacttggtatcaaacgctgtattttggtgttcatcaatggtttccccttcaaattcatttaaaagctaagatattatcctaaatctgaaagcacctccaccaaaaactcctttgatccttgcatctgctcctttgatactttcttggacatgatttctgttcacttggatgagaagaacttattccatcacattttctctccaaagcagatcaagatatcggtcgagtcattgaggtttatctcacgtcaaaagagcttgtgtatatctatgtatgtctgactccagtctgaagcaataatattttttgcattactgcatataagcccaactccagtttgtttcgtccatctatgcaaatgcaattaagttatagtttttttttnnnnnnnnnnnnnnnnnnnnnnnnnnnnnnnnnnnnnnnnnnnnnnnnnnnnnnnnnnnnnnnnnnnnnnnnnnnnnnnnnnnnnnnnnnnnnnnnnnnnnnnnnnnnnnnnnnnnnnnnnnnnnnnnnnnnnnnnnnnnnnnnnnnnnnnnnnnnnnnnnnnnnnnnnnnnnnnnnnnnnnnnnnnnnnnnnnnnnnnnnnnnnnnnnnnnnnnnnnnnnnnnnnnnnnnnnnnnnnnnnnnnnnnnnnnnnnnnnnnnnnnnnnnnnnnnnnnnnnnnnnnnnnnnnnnnnnnnnnnnnnnnnnnnnnnnnnnnnnnnnnnnnnnnnnnnnnnnnnnnnnnnnnnnnnnnnnnnnnnnnnnnnnnnnnnnnnnnnnnnnnnnnnnnnnnnnnnnnnnnnnnnnnnnnnnnnnnnnnnnnnnnnnnnnnnnnnnnnnnnnnnnnnnnnnnnnnnnnnnnnnnnnnnnnnnnnnnnnnnnnnnnnnnnnnnnnnnnnnnnnnnnnnnnnnnnnnnnnnnnnnnnnnnnnnnnnnnnnnnnnnnnnnnnnnnnnnnnnnnnnnnnnnnnnnnnnnnnnnnnngttgattgaaatcatggttgtttgaattgatatttttaacattttatgaatcagaagtcagataaaattcaattggcatatttgatatttttttggttgaatctttcattctgcaggtgttcctgctgcagtccaggttgaaagtcttcaatgctatgcatttctttgtagcctgtcacaagataaatggcaaattgaacttttagctgaatttccttctgttcttgttccattggcgagtgataatcaggtatgattctttgttagcgttactctctgaccttgtgtgtatttttttctcattttctgcaaactgccaatttataattgtttgcaaatggttatcctctgttacttttttggcttttttctttctgagaaaatgtgctcaaatgatttctttgcattgttttgaattttcttccagactataagggttgctgccatgaactgtatcgattcattgcgtacattgtggtgtcatgttgagcgttctggaaagaaaaatggtactctattgtcagaataatttgatgtagccctcaatgcctaattaattttaccttggaactttataagtttctaaattggtatgaacaggtaacaatgcaatgtggatccattttgtgggtgatgttttggcgttgatggatcagcaaaaaatattcatattgtctgacaagaaatttcttccttcattgtttgcgtctgctatgagctcatcctgtccaaacatcttggagcctcgaaatatcttggtacctcaacatatagaaaaaaggtatttatgatgttactatgacaattatcatttcattgtcaccaatattattaccttagaactatttgttatattcattgccttagctgctgctcatcaaatatgaccatgctctcttgttctgttgttggaattagctagatcttcttaaatgtggagagcagcattccccttttctttttaaaatctaaatgatataatgtttgacaactgacagtaaatttccctttgtcccgggaaatgatggttctgttgctgttcattgtccccattgtaacaactcaaagttcataaggattggagggatgcatgacacaaagaaagtcatatagggaaggggaaagtaaatttaagggtgggaggagaaagaaatggaaatttaggtagatggcatagagggttctctaggaggttcattcaatgttaaatgtgactatatatatatacacatatatattataaacagctgagaattaaaatggtactgaaccaatgcataaactgtaggatggaaccttaacttgacagttgaatgatcctatttttattcaaaacctgtttattcaaaatcctaacttagtacaaatgctaatcaattatattgcttataaattttgtaattatgggttttcacttgagagctgtttttatctattgtgttgttctacttctttattatggttgttctagaatgattgcttatcttcttcttgtccttatttatttcctctagatgaattcttcgataaacttgaaacaagaaattatgataaattccaaactaagcaatatgacactctagtttggagtattttattaaattgcatccttaggctttagtgtgcatgtgtatgtgtctctattatatgaccaattgacattaagtgtcaaattttatataacatcaaaccctattccttccttctcctttaatctaaaaaaggccaggattgattcactgaaccaatcacttgattaactgttttctcttcccgctacatgggccccgcctttgtatttttattgcttttgattcttttttccttgctgagtgctgacgagattgtgataagagttcttggctagtgtttccttttgggctatgaagatatagccatgaatggagtcattgcaaaaatactaattgtaaatatagtctcttcctaagaaagttcaagcaggcaaagttgctttatgtaccatacataaagacaagtctctagtagagactctctacaatcaaagaagccagcgaccattaattaaatgaaaatatgacattataaactagaatctcataagcgtcccgaagcgatccttttgggtcaccgtgaaagcattaaatgataatgaaaggtaggatttggtggtaatataaaatttgacacatgtacagtcacatatagactaacattgttttattttctttacatataagctttagtgtttttgtttgtttaatattacatgttgtgcggcttacctttttagtggactttaagctgctgttttgtgttattgagattgattgttgggatagaataggtttagaatattctgttgttattggttctgatacttatgctcattgcttgatgcatatatctgtgagtcttatcttgtaactttctccatcttacttttaccttttcattttgcttgttagtttctgtttttatttttttcaagaatgttccttatcttcattcattaaaaatgttcatttgtactaatttctaagattctttattccactttgttcccaaacatatcttttcaggtttgaccagcctacaaaaataaaaattcttggcttcattttgggttccactcttaaattctctaactatgggaaggtttgatgtcttaacgctcttctatgtttctattatatttttagttgtggagatatacagatcaaggtttcatatgttcagttccagattaacagtgttaagtgagggttttttgtgctatgccaagactttaaggaagtaacttatttgttgatgttggatgcagctaatgattttatccttattcaaaggaattgggaatgcccttatgcacgttccagaagttgggccgttgttgtcttcttttctggagcagtactataatgagctcaataagtcttgtccaaagttgtcaaacactgaaactcagataatgtgccttttgctggaggtatgtgtattgtatattttagttttagcttatgggatctttattatgaggtttggtgtgaacttgttcctcttcatgcgtagagctgtgttatgtcatctccctctggtggaaatgatcttcaacatcttttactgaaagctttgcgggtaagatattaagatgtgtgttttacttatgttatgtcttgttattttgaatttactgacttacattcttgggatctttcagttgggcggcatgacatcagatgaccctgcctgtgtaaagccttgtatcactgtcttgaacaaacttaacaatcaattctatatgaagttgaagaatgaagtgaaggtcttattggcagtatatctatttattttcagagtttgttgttgtcattcatgataattgatgagtatagctaatgatctagttaatgagtttatgataatctgtttcatagtgtaaataaaataattatcaccaatgtagcttttactgtgacctaaactaatagttttttcttatgcctgtcaggagcatctattttgtgagctcgtgattttgtggcataatgataatggtgatgtacaacgtgcaactaaagaggcattaatgtgcatagatgtgagttccttgctcttgatcaaatatcatgtgttctgtgtgcgatttctttagtggttacttgcaaagaacttaatcttttggtattattcaatctggacctttggggttttcatccctttaagaagggtgtttattttattttatttctgtttccgggggggtggggttgtggatcttggatccttttcccctttactgtggttaatgagctccgttgttttagctttgtgctctctgattctggacaaatcatggcctctctctttctatggcagtatttccatctattcccaatcagaccgtgatggtttctggctgttgaacttggcagccttgtgttctatcctccgttatctgtgtcactgttctgttctgttccttgctttttatttgatagcagatttcactgtgaaacaggtgtttcatcattatctgctgggtgtttagcttcaaattcatcaattgacaaaatggatgatatgtcattattcatcaattgattgtaaatttttttaaatgataagataaatgttttcttttaaaaatccttaaacagttaatatggtagtgacctgaggataaattttaacaatgtaaattccattgttatctgaccgaagcctttttggatcaactggttgttttgcactatcaatgttatttgttgtttgttttgcactatgctcttcaatgtccgatctcaccttgtggggtaagaatttgttgttgtttcttttcattgtagtgggaggtttttttccgactttttattccacggaaggaaaaaaaagaaatgaaattaagaataattggtggatatattggaattgcagattagtttctcaactgttggccacatgcttgatcttatacttgcacagaagagttgtataagtagttcagcagaagaaaagatggtgaagaaacaaaaattcataggacatcaagaagcaggatatcctcctaatgacatattcagaagagttaatgcagtctacatccttagttcccttcttgatgttttgctactgaagaaggacataacaaacaggtgacttggttacttctgaatctgaacattacattatgggtactgctgagatgagtagttaaaacatttaattgtgctaaattctcagtttgattgttgcaggcatttacttttagggcccttatttaagcttcttagcaaggtattttcagaagaatgggtgaatggtgccttttccccgaagataaagttaagccaaccttcaagtccttcggaagccaacaattacacaatatatcatattcaacagactctgttgataatcctggaggatataattatttctcttaaaagcatggatccgttaaatgtatgccttgtgaagctggaaaatttattatgttgttagaaatattattttgactaccttttcactattttagctatttccttatattattaagttttgccattgttgacaggaaaaaatgacaaatgaaattaacattaagctattgatagagtgcgcccggaattccacagttgcagtcacccgcaaccatgtattttctgttctctctgctgttaccagagtctttccaggagaagttttggagcatatgcttgatattctagaagttattggacaagctgctgtcacacaggtttgttaatacagggtttccctgtactgaacttagggcattcttttggtagagtagcttattagatccttttcttccctggggaacaatgttatttgtgtagaatagcttattacatccttttcttatgtttccatgcttgttggaaagttccacaagtcctacctcgattactagggcgtggtttttatacttgtcggacaacctcacttaatgccaattagttttaagatgaaatctaacatggtatcaaagcctccagccatttctgtcatttccgagtttcctttgtgcatcacttggtcagcaggcatctgtggaaggggagggggtgtggaaactggaaaatcctacatcacctacctcaattgttggatgaccttacttattaactgttgcaacttaacttttagttgcagtatttaatagaaattcttcacaattcaatttattagggactaataatccagtgtaggaactgtggtgtcatcatttctcttttttgcgtgcctgtagattgacagtcattcgaagcatgtttttgaggatcttatatctgcaattgttccgtgttggctggctaagacagatgatgtggagaaattactgaaggtttgtttttcacagaaatgatcttctgctgcttgatacaaaagaatctcttagcagttcaacctactaatatgtttttttttcctccagattttcatgaatatattgcctgaaattgttgagcacagaaggctgtcatttgtgttatatctattaaggtattcttgttctacttctacagttctacatcatgatcctgctattgatactttagccattggtttttggcctgtgtcttataatgatggctgttttgcagaactttgggtgagggtaaaagcttagcctcattgcttatcctacttttccgttcattaatttcaaggaaagctgcctgtttccttaatgttgagatgcaagatgttttaacattttataatgaggagtgggaatataaatttgcagtgcaaatttgtgaacaatatacaagtacgatttggcttccttctttagtcatactgcttgaacagaggggaaatagtgatgttgaccaggcaatgtttctggaattgtttattgtaatgcaattttctctgcaaaagttgcaagatccagaatttgtgtttaagttgaaatcaggtgaagatacctcagtcattcaggtataaatccatatcagatgcatgctagatacttgtatgctttttaatgtctttattcagttctataaggcaaagtctagatgtaacttatattatgatttttatggatagcttctatttttgcctgacccatgcccaataatgactagcagatacatacagtatgtttttgagatgttgatatctcttaactcataaatttggggatactatgttgacacccactggctgcaatgtggcgtcaccacccttgctgcttgtgtgcaggctaagggacatggtggaaagctttgataccaattgataagaactttgggagagcaacaccacaaaagctagccgttgtacttagttagagagcccgaggccttataaacctcgctagaattgcatacttctaatgtacaacttgattcccatagcctgcaattggatcctatcattaacatatatcttccctgatttattaattgaaggaggtatgtgtggggtaaaaaaaaatattgaatgtaagtttaaggggtgtcaatgtaatttgcctgacaaaatagtatgatacacatgatgaagttaaatttctatcaatcagaaattgtgattttaaggtgagggacagatcttacgatgatattgaagcagaagcagatttcattattatgaactgaaatattcattctttgtagaagaatttatatcatatttgttttccttttctttgtaggtttcatgctgagatgctgtttttggtttttgtgagtgcaatggcattgatgttgcatgcttcttatatttgtgttaatgttgtgatctttgaataagcctataaacacttgttttttttagatgaacatatttatcagaaattggacttagggccctaattcaacccgactaaactggcttgcaaggtgaggactgcccaagcttgataagttctatttaaccacatgtctagttgatgtgggactaaattaccacccttgaggttgcaattaaggcaacccttaaagaggccacaactaaggctaggtgtgactggaattttgacaactatccaacaatattcattatcaaaacctgaactgaaatattctttgtagaatatgtcatattttgttttttctttgtaggtttaatgttgagatgctgttttggtttcttattgtgatagcaatggcattagtgttgcatgcttatattttttttttgttttgcaaatgttctaatctttgaataagcctatattctcttgtttatttagattaacctattcataataaaaataaatgtgatcgcttcttgaatatttcagagggcattgggtgcgcttatggagcatgttgttttactcatgcaacttgtagatgcaaggaaaaagcaactgaatttccctgtaattctgaggacagagttgaaagaaactatgcgtgcacttgcaaggaatctaacaacagttatgatacctgtcatatactttaagatcataattaaattgcttcgccatgcagacaagaatgttggaaaaaaggtatggtttttaatgaagttacaaaatatgagattttattaggatcttgtattattttgatacaagggtaaaatggtaaactacaatttggtggtgtatttatctgcttcatagtattctattaaacatcctgattttcaagatgtttacttaatttggtgggtatacacagtggtcatttattcttttttcttatgatgattgggttttattcacatgttatgaatacagttggttctatatataccgtaaattgtttagttggtattgcccacacatcttggtaaattatttatttgccttttaatatgtgagcatgagcgcacaataagaagccaaaaatactaagggggtgattacttgcacttttgtttcctgtattcattttctgttttcactttttaattacaaaaataccaccttgttttcaatctgtttcctgttttcatttatttgtataggaagcgctaaaaacttttttccccctccatttcctgatttgacaatcggaaacaaattgaaaacaaggtgacatttttgtgactaaagaaaacagacaatagaagtgcaagtaaacactccacaagtttttaatagaaaagaaagtattgatatatcgaaaaacataagagtcttccaatgtttgcacaccatgagcacggtatagaaatccacatcttttttgtggtgtgaaagcaagacagtgagaactgtgatttgatatttgtatttcttgtgctgcaggctcttgggctgttatgtgaggctgcaagaaatcataaaaatgtcagtttaaagcttaaagacaataaaggttcaaggtcaactccaagttttcttttgcttcatatgagtgaaacttctcaagaatcacttaataaattgtgtttagaaattattcgagtacttgatgattcatcaaatacctccttgaaagtggcagcagtttcagcattagaagttctagctgaaagatttccttcgaataattccatctttagtctgtgccttggatctgttacaagacatattgcatctcataacttggctgtgacttctagctgcctcagaacaactgctgccctgatcaatgttctaggtccaaaatcactggcagaacttcccaagattatggacaatgtgatgaagtcatctcgtcgagtattggctagtttggatatgaaacccgaaaccaccgatgttttatcagcctcaaatgaatcccatttttatgttctcatcactttggaggcagttgtggacaagcttggtggatttttaaatccgtatcttacaaatataatggagcttctggtgctttatcctgaatgtgtttcaggaatggatgtaaaggtggagtctagagctcatggagtacgaaagcttcttgctgaaaaaattcctgtaagacttgttataatgtagcattgtgtaattgtggtatgaaatgaaatacccatttttttctttaccaatcactttatttttttacaggttcgacttgccctgccacctttgttaaaattatacccagctgccattgaggctggggataaaagcttaacaattgtatttgatatgttgggaaccataattggtacaatggacagatcatctattgtggcattccatggaaagatatttgaccattgtttggttgctcttgatctgcgccgtcaaagtcctccttcagttcaaaacattgatgtagtggaaaaaggtgtgcttaacacaatgactgttctaaccttaaaacttactgagagcatgttcaagcctcttctgataaagagtattgagtgggcagaatctgaagtggatgaaactgcatccagcggaagcattgatagggccatatcattctatggcatggtaaataagcttacagagagccatcggtacgtcagtatttagttagctagttattgttcgctttagaaaatgttctttgaaataagcatgctttgaatttagtcaaacaacactttatttgggtttctaaatattttgggtatattttgtattctctgaagaagagtttagctttttgtttgtattaaattatgtacatgtgatgtagatacgaaaattgggttttgaaccactgtaaatatgtcaaccacttgtgacagttgagacttgtacaatttggtcgcagtatttaaatcagtagttagttttcaatgtgatttccttaattattttttatgtttatgccaataaacataagaatataatcacttgttatgatgttaccttgtttacccaaaataatgatcaaatcacagcagtttaagatggtcctatatccttatttgtaggtcattgtttgttccctacttcaaacacttgcttggtagttgtgttcatcatcttagcgatggtggagatgtggaagtgtctagagtgaatcggaagaaaaaggccaggattctagatgatggcaatataaaagaaataggcagtgtgtctatcaagggctggcatctaagggctctagtcttgtcatccttacataagtgtttcttgtacgacactgggaccttgaagtttcttgactcctcaaatttccaggcaagtgaattgtttacataataagaactcattttttcatctattcgtatccgataccaaaacttttgaatacttcactgatacgcgtctgtgaagcatcaagcctttttaaagatatgaaaatctaatatagtttacatattgagacatagaagcatgtataaaaattgaagcattgtccattgatgcaccaaaatggaaactatcctctttatggatgatctcaaaaaagtaatgagattgatactattttgttggtagattaataggacttgatttacgatgatttatactttttaaataatgtgcaggaagtatgcttttaatttgaatttgcagaattttttttacatgtctagatttatatcttatacctatcctatcctatacatttttagaataattgcagtcatgtcagatacttttcatatctgatatatgtatcgcatgggcatcaatatctatttttaccatttgaaatggttatgaaaaaattctttagaagactttttttccacctagagtggaattttttaaaggttatgcattaattgggaatttttcctttccatttaaaaatactttgcattttttctcattccattgaggaataaagtattcctaagtctttcagcttccttcagtaatatagttgcttgctatattctctcactgactgttatgtcatgcttgctgcagatgttgttgagacccattgtttcacaacttcttgtagatccaccagctctgttggatgacagcataaatatactaagtgtgaaggaagttgatgacctactggttgtgtgcatcggtcaaatggcagtgactgctggatctgaccttttgtggaaacctttgaatcatgaggtgaactttatgatttcttttcatttttactactcgttaatgattgggcaagtaatttgatactgacatactggtaacttactggcttcactatcttgtttttcattgagggaaaatgcatatgatcattgtcctcgggaaacactgttatgaatatgactggttctactattctccctattagtttgggtgcatggatgccccaagacattttaacaatagattaagaatatgtctaacagtagaagtaattaactctctaaaggccataataaaagtgtaaatacagatatggccccccaaaacttttaatttaacgaatccactcctcttacatgtaaacattcagtcagtagctgtggtgcagcagcaagccaacaagctggacggggcaaatgggctcctagaaatgccagcaggttcaaacgtggagtttccaacattagtcattcaaactagaaaaacgagcaaatccttaccaaaacttcctttgctagacctccatttgtggccttgctaacaactacctatcaacatcacctaagcatagtaaaatcatgtcctatttgggaaaactctcaacaagaacttctaagagaataaaataagtaggtaaaatggattgagtttcttaagttgaaattaacgtgagttaaaacaagttttttgagaagctaaatcagaacttctataaaagtttattttaacttatgagagaagcttaattcattttacgctctttttttccttattctgtaagtgcttattgaatagtttatctgaacagggtttcagtcatgttagagttgaccttttctgctatgtttatcgggctttataaggtttaattgtaaatagactgtagcttttatgtcattttgatcaaactttagtaataatgtcaattgacgcctgcggttttgacctaccctaccggccaatgatctttaaagatctgaacttgctcctgtactcttgcatcccatttcatagtacgttagctttggtcctttgtagtcatcaatgcctcatttatgtgttgaagtttagtccattagtttgttgttaatagttttgggtattcagtaatatgtgttgctcttgaatgctatatgtttgttccccgcaaatactagtattccttagcaactgaatatctttctgccttctttatcccgttttttgcaggttttgatgcagacacggagtgaaaaattgcgagctaaaatattgggcctcagaattgttaaatattttgtggagaacttgaaagaagaatatctagtgttcatagctgaaacaatccccttccttggcgaactgcttgaggatgtggagctttcagttaaatctcttgctcaggaaattctgcaggaaatggagtctctgagtggggaaagccttcggcaatacctatgatgtaagattaggagggcagtatttatggttgtgacatgagcaaagagctagagatatgtaatcaaacaagaaatttaatcgataggccagtgtaaattgtggttaattaaggaaaattagcatttgtatattccgataatggttaaagttcaatttttctcgttcaacttttataacactcaatcatttatagcataatgcttttaagaggaatatttgtaataataaagagagaagaaaaagtataaaaataggattaaattgatttattttgaaatttgatattttttttaatatcatactacattcccagagaaatttaatccaagactcttgcagtctcttatattttgaaaagtattctatttttttttttttgtatctctttcatttataaaataatggttgataattttggtagctttattagggccgtattaagaatagtggaattaggaagtaagacaatggataagcaatgtacctgcttgcttgtggcattgatgactggtttaaaaattaggtacgtgttgttacattaattatttttttagagaacgttaattgttcttttacaaaaagaatctgaaactgataaattgatggaggctacggatcagcgcggcagatgcaactgtcacatcagtttttttataataatttttaattctatcataaaatcaagtattttaaggatgaaggttttcagtagtcttgaaaaatggttcgtgtatgatcaatgaaaggaattgtgggaaatatattacgtagaaagtggccaggtaaaagtttaaaaaattattcacgttttaacttttgattttcagactataaaaaatgtttatgaaatcaaaacatacactattataagttatatataattcttaaaaaggatggataagacataaaaatataaaaaatatcacaactatattgacatccttattttctaagattttataccaatacccaacggaaatttatatacaaaggaagaaaaaaaacaaaatatgggaggattagaccaaggtccatagccaaatcaacaaaactcatagcagctcattaaaattacgggcataacggtgagagcaaaaagggggaactgaatcccagcaaaaataattacgactgagaactgcaaaattagccaactgatctgcagagtggtctccttatctatagacacgtgtagctttaaaactaatatgactggatctataaacacaattgttccatttagtggaaaacttccaaggaacaagattcaggttatattatttataattttatataaaatgtaattttatcgatctaattattaaattataattatatgacatattttttgtttttttaaaagcaatttatacattgttagaacacttagtaacaacacaaggtgtgcctaactaaggccaacataacatattgattagttagttgtttcaattttttttaatcaaattaaagttggacaattatataatttgttaagtaactctgaaatttagttaccttttagtatgacataatagcttatttaattttgtaacattttgcttaatgtcaaacatagcacagagttactcattacgtttgacagcggagtttatggatggagaatcaaataatggcagtgcactttcatgttacactaagtgcacgctacattaggtgacttatcaaacaataatatgatgaaaatgctataaaattatttattaagtttattttctacattatatatgaattttgtttgttttaaatgtgattttcaaaaactaattgtatataacatttatattatatatgtgattatttcatcctcaataaaatttcaaaaacaaatattagtttaaaaaaaatataaaaatatctatggtcataattgaaagtaaacattaatatttttttaagatgaagtttctgcaaccatcattttatttatttataataaattagctatcatactgactataagaatctacttgctgattatatattagattaatatttgtattgttcccgctgcactactcataccataggggtaaaactttatacaccagcaaaaagacttatacatccagaatttttttaaaatgccaaaaatgctctcgcgctatacaagcacggattcacgaatccgtaagattcttacgaattcatgaattcgtaaaattcttacggattcactaatccgtaagattttttttttttagtcatacagattgggcaatccgtatggtccatacggattggcccaatccgtaagtaattttttttaagtaagtaagttttttttttttaagttaaaaaatatttttccaaataatgacacatgtaggttttaaacctgtgaccttcaggttatcaacacaacacttcaaccaactaagctaataggtcaattatgctaaaagttaattaatgttgatacatataacattaaattgttaatgtatatttaatacacgtataagtttacataataaattttgtaacaattaattttgatataataattaaagtattttttacatataaaaatcatagatttaaataaaaatcataagtttaataaaaatttacaggtttaataaactataaatacaaatataatttttaatttaacctgtaaatacaaatataatttttattagtcctgcaaatttttattaaaattatgatttttatttaaaactatgatttttatatgtaaacaatactttaattattatatcaaaattaattgttacaaaatttattatgtaaacttatatgtgtattaaatatacattaaaaaatttagtgttacatgtataacaataattgatttttagcataattggcctattagctcagttggttggagcgtcacgttggtcacaggttcgagacctacatgtgccattattttaaattatttgaaaaaatatattttaacttaaaaaaaaaaaacttacttacggattgggtaatccgtatggcccatacggattgtccaatccgtataactcaaaaaaaattacggattcgcgaatccataataatcttacggattcacgaatccgtatgtatgaagcgtaataaaagtgagggtatttttgaaaatgcactattctgaaatggtgtataagtctttttgctggtgtataaagttttacccataccataggcatcatcaaatcctttttaaaataccaagtgggtcaaagttgggcttgtcttccttccaggctgaacccatgctaagctatgaatattaatgaagcttcgtttgataccctgttagaaatcgtgtggagtcttttcaaatgatatatcaataattgctttttgagaatgcatgtggagtacatgtgccattatagaaactgcagaatttactttactttgttacgggtcacggggtgaattgaattctgcacttgatcagcaacacccatcttccacgcatccaacagttttaaatctttttacatcatctttcttaataatacttttaatcactaaattaaaatattaattttgtacaataaaatattaaatacatttaatttttatttaacattattaacaaaacttattataaaaaaataacattaataattaaaatttagaatataaaatacaaagtatagtcaaaacacctaaagaccgtgctccaccctctttatccacccctctctctcaactactttataattttataaagatcgtgctccaccctctttacccaccccctctctctctcaactactttataattttataaagaccgtgctccaccctctttacccaccccctctctctcaactactttataattttataaagaccgtgctccaccctctttacccaccccctctctctctcaattactttataattttataggaataggaatttttatagaataggaattgagtaaaaaattgtgcctacatgaatgatcgtcttgttagtgtagtccagttatagcacaataacaagtgaaacactaaaaaccaatgtgctttaaatcattataccaataggaattaagattgattctatttgtatagcctttatctaactaaaacaagtccatttctgaattgtcagcataccaagaattttgatacgccatagcattattcaaaattccattctcatcatagaattacattagaactttgatccttaaatacctgtgcagaaaagtggtagtataacatacaatggccatgagcaaaacgagttctgcattcaaagggcttttgcatacactagccaaactgataatcacatagcagaactgacagtgagacaaacttttgattttgctaacagatgccaaggttcaagtgatgtaggtatgtatataatatattagtttcgttatgcgccatttttagttatttttattttccatttcagaattcagttacttaatttcctggtctaatgtcatgaacagaaattgtgaaaaatcttgaacgcttggagaagtagaaaaacatactgccaagtccagaaattgatgcattcatgaaggttgtttcatcttataaataatatctgaaaaatcatgcatatatgcaagttaagggaagtactctaatttgtgttttttttaaactgattttactcaacagaacacttgttggtggcaaaaaccacaatgttaagacagattatgttttgaaagtgccttggtcttgatgtatgttcagatacggttgtgggcaatgatatgctaagaggggtctctgttgcccaaaaaatgagagttacaacaggtgatctctctcccctttctaggaatttgttacaattttctttgaaatttggctcttgtagtgatatatgcttaagttaatctaactggattacctcttgtatcatacaaagaaagagggtccaaattcagtccctctattttttttcttgtttttttttttaagatgaagttaattatttccacttgtaatgtgaaatatagctttgataagatttaaggagatttcgtttagaattttgtttttgactcctaagattggaaattgatatataataatagagaagctaacacagtccatacatttgaatccatatttgttctaggaacaataatttatagatgatacaaaattcaatccatatttgttttgacagtgtctataccagaagattaagacattatgaaggcactaattgaagttaaaaattgtagcaagcaatgacatacttttgcctttcatattttttctccaagagaaatgattgttggaccacgaaaagctctatttatggatgctactgttctgatagctctaccacatcccaagtagtgaaatgcataggaaattttgttcatcaaatggatgctactgttctgatggctctacttcaacctgcaccataaacatttgagctctttgatgatcttctgcttctgtcagaggggtacgttgcatatcaaggccccataggagacgtgctggagttttttgaatcattaggcttcaaacttccatcctgcaagggagttgcagattttcttcaagaggtatttgtagatttttgctcctctaatggttaaactcaaatgctttatgaaattattgcttaaaaacatgttattttcctgtgtcaggtgacctctaaaaaagatcaagctcaatactgggctgattcttcaaagccatataaatttatttcagtgccggagattgcataagcctttaaaaattccagatttggaaagtcggtagaatccatgtgtactgctccttttgataaattaaagagtcatccttcagctttgcccagaactagatttgctgtgccaaaatgggagctctttaaggcatatttctcgccagagaccttgatcaacaggcataagtttctctatatttttaggacctgccaggtatgtatatatactcaagtaaataaggatgcacttgtttctatatatagttttcaattcttaagttttttacaagtagaattcatgataagttagcctaatgtttgtgatttcttggtaccacttacagaatatttgtcagtaacatttgttggaattgtcacatgcacaatgtttgtgcaaacaaaatttcatggtaaggatgaggaatatggcaatctctatcaatctgcactatttttcggactcatacacatgatgtttaatggccattctgaattgtcactcatgatagcgtgtcttttacaaacaaagaggcaatttattttatcctggataggcatggtctttggccacttgtattcttggtgtaccttattcccttgttgaagctcttatatggtctcgtgttgtatactactctgttagttttgcccctgctcctagaaagtatttttctttatttgtaaaccaacagaatagtatacaacacaagaccatataacagcttcaacaagggaataagttacaccaagaatccaagtggccaaagaccatgcccatccaggataaaataaattgcctctttgtttgtaaaagacacgctatcatgagtgacaattcagaatggccattaaacatcatgtgtatgagtccgaaaaatagtgcagattgatagagattgccatattcctcatccttaccatgaaattttgtttgcacaaacattgtgctttgtgcatgtgacaattccaacaaatgttaacctttggcagcaagaaaaaatgtcgaatttagaatcatgacaacatacccacaaacaataattgataaattcaaaaagcacaagcctatatactgacaaatgttttgtaagtgataccaagaaatcacaaacattaggcgttctattgatatatcgtgtgtattttgaaactctaaacttatgatcatcttgtctatatgttttcgatgttgaattgattggcaggaaaatttgttggaaccttggaggtaatctatatatttaaatatgagctctacttttaagttgcaaaatattgaaggtcccctttctaacttatcatgaattctacttgtaaaaaaatttaagaattgaaaactatatatagaaacaagtgcatccttatttacttgagtatatatacatacaactctctcgcgagaaacacggtttaaagatctcccattttggcgcagcaaatctagttctgggcaaccctgaagtatgactctttgatttattaaagggagcagtacacatggattatacagactttccaaatctggaatttttaaaggcttctgcaatctccgcacactgaaataaatttatatggctttgaagaatcagcccattattgagcttgatctttttagaagtcacctgaaacaggaaaataacatgtttttaagcaataatttcataaagcatttgagtttaaccattagaggagcaaaaatctacaaatacctctttaagaaaatctgcaaatcccttgcggagtgtaagtttgaagcctaatgattcaaaaaatcaaagagctcaaatgtttctggtgcatgttgaagtagagctcaaatgttagcttctctattattatatattaatttccaatcggagtcaaaaacaaaattctaaatgaaatctccttaaatcttatgaaagctatatttcacattacaagtggaaataattaacttcatcttaaaaaaatagaagaaaaaaatagagggactgaatttgcactctttctttgtatgatacactaaaaggtaatccagttagattaacttaagcatatataactacaagagccaaatttcaaagaaaattgtaacaaattcctagaaaggggagagagatcacctgttgtaactctcatttttttggccaccagagacccccttagcatatcattgcctacaacaaccgtatctgaacatacatcaagaccacttcaaaacataatctgtcttgacattgtggtttttgccaccaacaagtgttgcctgttgagtaaaatcagtttaaaaaaaacacaaattagaggccttccctgaacttgcatatatgcatgatttttcagatattatttataagatgagacaaccttcatgaatgcatcaatttctggacttggcagtatgtttttctccttctccgagcgttcaagaatttttacaatttctgttcatgacattagaccaggaaattaagtaactgaattctgaaatggaaaataaaaataactaaaaatggcacataaggaaactaatatattatatacatacctacatcccttgaaccttggcatctgttaacaaaatcaaaagtttgtctcactgtctatgtgattatcagtttggctagtgtatgcaaaagccctttaaatacaaaactcgttttgctcatggccattgtatgttatactaccacttttctgcacaggtatttaaggatcaaagttctaatgtaattctatgatgagaatggaattttgaataatgctatggcgtatcaaaattcttggtatcctgacaattcagaaatggacttgttttagttagataaaggctatacaaatagaatcaatcttaattcctattggtataatgatttaaagcacattggtttcagtgtttcacttgttattgtgctataactggactacactaagaagacgatcattcatgtaggcacaattttttactcaattcctattctataaaaattaaaaatgttgactaaataagattgctctacataatagcttaatatttgtttcaaagaaccgaaaggtacccataatattagtaattacaaattgtaaagtaatactcatattaacccacgcggatgatggttatagagtttaatttccatgaactccaaaatttacattgtcaatcaattatgaattataaagtagttatagtaaatatcaactaacttactttatatgacagtttgtaacttaacaacagtgtaaaaatcctgtacataataagtgtatacactatttattagtcataattaaattaatgttaaccattagttctttaggaccgtacacaaaatgcattgcatggaactaatcagttacaaacttaaaaaattagtgacagaaatgttccaaacttacagcaactcctggagaagttttgaagccaagaacacatccaacagtaagaccaacaacatagtaagaagccaagtttacataagccactactgcttgccatccacttccaattgccacccctgaaattttccaagaaaagttaacaaaagtgtgataaaccaaagttggtgcttatgctagtgtactttttatagctttattacctgataatataggttgaatgccatttaagaaaacagaaatagaaagcaagggagtcaaattagacacagcaccaatgacgtcagagtcaggagtgaaaaatttgctcaaagaaacccggaatatcaagataattgtgcagaaaaccacactaatgaggatgctggttccattcactacgaagacagaaaattttgctactcttggatgtgatgctactaattcgttgctgacttggacactgcaatcacggaaaataccattagcatgcttttgagaaagttgtttgaatgaaaaacacattgttttgttgcaaacctggctactgtactaaggcctaacataaattgcatgtcccagttcaaaaaaaattgcttctaactctttattttacaaattaaagttcaaattttttagaatgtttgcgttttttatttatcattgttgttatctactgtaataatattgatattttaaatgataagataaatgctttcttttaaaaatccttaaaaagttaatatggtagtaacctgagaataaattttaaaaatgtaaattccattgttatcactgaccgtagccttttggatcaactggctgttttgcactatcaatgttatttgttgtttgttttgcattatgatcttcagtgtccaatctcaccttgtggggaaagaatttgttgttgtttcttttcaatgtagtgggaggttttttccaactttttattccacggaaggaaaaaatagaaatgaaattgagaataattggtggatatattggaattgcagattagtttctcaactgttggccacatgcttgatcttatacttgcacagaagagttgtataagtagttcagctgaagaaaagatggtgaagaaacaaaaattcataggacatcaagaagcaggatatcctcctaatgacatactagaagagataatccagtctacatccttagttcccttcttgatgttttgctcctgaagaaggacttaacaaacagcaaaagaatcaaaataatattttttaataaatatttattaatttgggattgtttgaaaactattaacgcaaatgagactgtcaaacacgtccaaattaggtgtgactaattttgatgctaattcggtctctatttcagtcgctagcactttttacgacaaaatattatgattttttatatttacgatcacaatattctgttacaaaaatgttagcgactgaaataaaaatcgaaattagtgtacgaatttaaaatcaattttttgatttacaatattatttttttcaattttttaaattagtgttgcgatcacaatattatattttttaatttttttaactgaaatcgttaaaaaatttaaagtataattttttttaagcatacgtctttaaaatcattttttttacaattttttattatgttgttagaaatattattttgactaccttttcactattttagctatttccttgtattattaagttttgccattgttgacaggaaaaaatgataaatggaattaacattaagctattgatagagggtggattagagattaattcttctagcagtgtgtaattattattgatttaagaaaattttatttacaataaaaatctaacatgaattattcatttaagtaaattatttctcgcgtatgaatacaatagaatcttagtcattatgttaatcctataattctattatttttcttttaaaattacaaaaaggttaaaattttattaaaaaaaatgaagaggcaacaagagccagaagatgtggacttcgtagaacaaatgtacatcagatagccttcatcattcatcaaccatacatgttttgagtggccacatagcaagtctcagacactcttaactttctacttggaatcctctcataccgttccaatgcacatgcatatttccaatgccaatggatagagacatctgggtagtccgtggcaggttgattcaatatgagatctcttttctgcctcatgaatagttagcacatgcttattctttgtttgttgttagctagttagagaattgagagtgagggcgagctagtaggagtattagaagggagatgctgattacaggaattatatttcttctaatcaacacaaaatatgtacaatccttttccttgcttatggagttattttgcacccaaggaaatgggatgggacctacgcggttttgcttaatttccttgctgcttcacttcgctctcatgctgaaataaaaatacataaagctcatggaattgggaaccattggatggatccacctcttcttaattttctttttctctcccactcaactgccccgacctctaaagtcatgccgcccgtacgaaaatttattatttatattgtcccatcaaataaataatcattatactttttaatgcccacgttattttaactaaataatatttcatgtttacgctataatatttgaaagatgaagattataaaaattgtagaatatattaaaaacgaataccaaagacaaaagtcattaatgattgacattgaatattaaagttatcgacgagtaagatttaaaaatttgtaataagagttaaaacttataaacacccacacatccttttgtctcatcgtgacacttgtggatcaatgaattattacaatactctaaaacattttaatttcagcactttatcttattcatagagtaattttatcgctttcttttacatttgttatacttccctttaaatcttcatcttttttcaatctcaatttcttctccaaactttttactcctttaatcttctgtatcttttttttgcgcactttattttcgtcaatactcttttattttaaagttgttctatgatcaatttgcactttactctttattacatacttttagtttgttctcatgttaaaaatttaacattaacctatggtacagtacctattgaggaagataaaagactttcagagaaaatgttcatcctttttctcaaatatctatgggattgtgtcgactaaaacaagcacaaaattgcatggtcaaaatactataaactatttcaaatctttttaaacttgcagcaatcgttttactattaactaactaaaatcagaatgcgttaatcattttttaagggtatttgtgacactgcacaatcttgaatatcttcccggcgggatacacccgaaaatcaaaagttatcatgcaaggatatgtttggtgtgtcttacgaaattcgattatatacatcatgaataactatgtcggttgattctcaacaaagacatcattcagcatcttaactgggtaattgtcttcaatctgtttaatgctaaagcttctttaatctaactcatacaattatttgtatatgcatgacatttgggaaatcaaagaaaatatgacttaaacgagagtgtgtgtcacaatttcaagatgacaggcctctggccatggccctcaggacttatatattcacctttctagaaattgctaatgttctcagtgctgattgtaaacattacgactactagtatcaatttgtgagctaatgactgctcatagaaccatctgtaatatgttgaattgatcagttctgccttctagttgacacttgagcgaggacttgatcaatttaagccattttaaattttactggccacttccacgattttgtcaataaattcatattcgtacctacaaaagtacaaggccttttagttcattcatacacaattttcattttctttctaataattatcaaagtaaatccgcacaaaagtaattaccacacaacaacaaaaacagaattgcaaactctaaacaaagcctaaacaccgtaccccaatgtctctcacaacgttattccttgttaacaaagtcaaatttaaatgaacggatttcaaattaaacggttcatagattttcatgaacgatgcacatattaagtgattattatcatcaactatactagtataatagacattaatcatgaaaataagcaaaaagtaaaagaataatatttgctgtacccggttttcaagtaaaatcctttcaagttggcgacatcaaacaaagctgacctccatttcttcaccctctcagagtccttacccaacatattttcatgctcggtcatggcttcaccatagctatttctttgatgccttaaatccgacggtaacactttgtaaaagatggggcaaaccagctggtttttggtctccatacactcaaggatggtcaaaagcacatcaagacagtacgaggaacgtgcatagttttcagaaaatacaatgatcgaaagccttgattcttcaagaactccattcgtagattgtgaaatttggtccccatcattcatgaaggtttggtacctacttcggcacaatgcattgttcagaaaacctgtaaaggagcgggtatcgtttccactaaaactcagaaatatgctatagcggggtacaatgaagatggcatctcgcacaatgtcttcgattaattcatattcatatcggcgcctacaaaaacgtacaagaccttttaattcattcatgcacagtttacgtttttctttatctattcttcattactttaagacgggttcaagcaagaaactctctcactcacttgcacattttttacaattaattaaaaattataaaattatgaatgaaaactattaagtaaaaagtgagatctataaattttataattttaataaagagtgcttaaaagttttttttttaatataataaaattgagtttcaataatcaatctccccaaagatttcaaggcaataccttaaaactcttaaggcaaaacaaattaaaattaacttgataaattagctaaaagcttggattgtttcttactaataataaattctagtgtgataattcataaaacaaattccttatcaaacagtataattattattggtttctattttgtttttcttttaagaatgaaaggagaattaactagttacgttagattgtcactttaagaatattggccaaagccttgcaattctaaatataaactggctcaagcccatgttaaagagtcatttgacaacttagaagttagaatattcaataaggtataaatcaaggaaaaaagcttcgtgcaaatatcacaagtggttttggtctttgaggattaaaatgctagtttgcatgacttaagcaataaaaatcggcatgagttacttaacttagtatatgaaattttaatttcaacaatgatacataaacaccatcctaggctaaagattcatttgatcgaaacattttaattttaacttaaatatctttttaattcttataatttaatatttatttttttgtttttataaaattattttttgttttaatccttacaaacaatgtttatttttattttggttcttataggactttttttttactatctagagtactatagtatttaaagtaatttaaaaactaaaagtaaaatatatataatttataaagactaaaaataaaataaaaaaaaaaacactaaactattaaaaacatatttacacctttatttttcattatctctcttattaatgtcacgttgttctgtgtttcttttttctttcaaagtgtaagccagtattgaatgcctacaaaaaattgttattttcattttcttttttttcaaattaagaagcggtactagctaaattaagaagaaaaaaataacggcacacctggaggttccgtctccgaaacaccatccggacaagctggcgacttcatacaaagctgacctccacttgagtactatctcgtttcctaagcgacgttcaaggttaaccaggtcctgtccgaaactaccagtctgattccttacatgggagggattcacgtggtaaaacattggaataactagttggttctttcttgcccttaactcaaggatcatgacaagttctttaaggcaccacgaggaactcgcaaagtttttggagagaacaacgattgaaatcctggatgctttcaatgcttcaagaatagcttcaaagatttgatcaccacccttcaacccaacatcgaagaatgtcctcaatctcgccttccgcaaagcagcatagagattacctgtgaaggtgtggcgcgtgtcttcccctctaaaacacagaaatacatcgtagcgccacttcgcaattcccccttcatccgccatcgcattgaaactattaagcagataacataagatattatatgatgtgctgacactatgatttacgcgcttttgcttaatttccttgctgcttcctggaaataaaatatatggatggagtccttgttttcttctccattttctattcgaaaattatatatgtccccctcaaatttgtgcatttcatcaccacttgaagaaaatatattatttccttaatctcattataattgtcacgagaaaaaattaaatctcaaaataattattttttgttattttaacgtaatattaattatcttttttttatttatatctcttatgatgttaaaatagacaataaatttataaataaattaatgatgatataaaattaattttataaaattatcattctttttcaactttttattttcatttttatttatatataacaacctaaaaatacaattataacagaatgcaggaattatattgtatgtataaatatagttgattttactttatgagtgactaataattatttactattagatatagttaattgcatgcaaaaatataatttactttacatcacaactattaattaactttgtatcacaagcagttaataatacgatcaaatcattaaaatatataataataagtaaccatatgaaataaaataattagtttcaacctaaattctaattaattacaaactttcacaatattttcgccaaatagagagagaaaaaaagataattatgtaaatgtggatccaattactttgaatatatagaaattattgatttggaatagagacccaaaaataaaattatatattctattcaaaataaaaataaagtgcgagtcatagctcgaaatgaacctccaataacataaatccacaaggattttttttcacgtactagacaaatttctttatacacccaccaaaagcaacaaaaaataaaaaatgtccttccataagatttatacggattgacaaatccgtaaggttcatacggattgataaatccgtaagaatcttatgaattgcaaattcgtaaaaaccttacggattatggattgcctcatcgaccttgttgacattgtcgatggcgagattgagttggggattgtggtcgaggatagagaaggggatgtcgagggagtgggccttctcttccgtgctgttagaggtgggaaccccgacgatgtcggtgagttggccggaggcgaggagggcaccgagcttggcgacgacgaaggatatggattggccaatacgtatgaatcttacagaagagtatttttggtttttcattttattgttgggtgtatgggaaaactagctggtgtaggaagaaaaatctaatccagaattgggacaaaatgtaggacccaaccaaataatggtttgtgtgatgatatttgtgatacgaaggtgaataatgaagagattaaatattctagaaatacctaaactagaaaaaaaaattatgtatcacattgttcatagcttcctttttatacaaagataaggaagagagatatggtatacaaccttattcttgtatatacaaagaaactttttccatattcaaactcatgaccaacaatgtactaaagcataactatactaagattaaaaaaattaattaaggattaaaaactaaaatttaattttttaaaacgacttaaattaaaaaaataacaaatttatattgactaaaattgaaaaatgataattttttaggaactaaaatttgaatttcaaaaatttctaaaaagacatagaaaatataataccatgtgacaaaacatattagtatcacccacatgggtgtcacatgattacatcatgtgtgttgctgacatgcaattttgttggacatataagtatttgacagtttttatttaatgtgggagactaaacttactttaaaaaatagagactaaaattggataaagaaaattgacagacttaaaaatggaattctgaaatagttgaatgatgaaaacttatctaactttaccatagattgtgtatactctgtttttatttttgtgagcagaaggcgatgtgtttaaattttgtttcacggtgccttacctaatgccaatatgacaaaacaaaatattaccacttgttttttttttttatctaatcaacacaaaacattgaaacaagatgtagaaaaacacaacagacctcgagaattgaacaagatttagaaggaatacaataaaccttaggaattgaactggatgtaaaaacaacattgataggcacaactgaattcaagggcagttatggatgttacaatcagttagtcacacagctccacagcatatacttgactgactttcgctgtcattggataaaaggaaaggatttgctatatgcttgctacctcaagtttaatgaccttttgtacaatcctttcgataaattcatgttggtacctacaaaaatgcaagatcttttaagacattcatccgctgtgttcactttctttctccttatcagactttatgtcatcaaaacaacaatattaagctcgactaattaatcttctcactaacagattgccgtacaaaatacaaaaaatgctccaaacaaaacaacacacaataccccatgtctcggacaagaactgtgccatgtttagcatttcatagatggtcaatatcacttaagagcgaagcatatattaagtaattaattaaaagcattacgtactcattttctttgacatggtctccttccaaattgctgattttagacaaagcagacctccatttctgcaccttcttagagtcctttccaaatcttttttcatgagcagtcaaggcttcaccataactttttgtttgattgcaatccgacttttgcacattgtaaaatattggccaaaccatttgattgttggtctccatacaatcaatgatcttggcaagttcatcaagacaccacgtggaatatgcatagttttcagagagcacaacaattgaaatccttgaactttcaattgctctcataagcttctgtgaaatttggttcccactctccaattcctcatcgtccatgaagattttgaatccctctcggcgaaaggcattatagagaaaacctgtgaaagtgtagcgcgtatcctctccggtaaaactcagaaaaacatcatatccgggcaaggcttgcacggctgattccacgatcctttcgatgaattcatattcatactggtacctcctataaaagcacaagtctttttaattcaccaggggtattcgagcatgcacaaccatattgtttctattaatcagaattataaaagttgacttaagcttgactaatctataaaacagattgcgactgctacactgaaactggaaacagaaccttcaatttacagcacacatgtatttctctcggttaaacaaaacaaagtgactttctaaaacgataatgagaagagaagacacactgtttagcagattacagataaaataagtaatagttgtagagattattatggaacttaatcaattaaaagtaagcatacccagtttggtaacaccatccactcaagttggtgacttcagataaagctgctctccattgcttcaccctctcattggaatctctaaatattgcttcaaatttatacattgcttttccatagggacctctctggcgccttacgtccgacggatccactccgtaaaagatgggccacaccagttggtttatcgtcctgttacactcaaggatggccacaagttcatcaagacatctcgaggaggatgcatagttttccgagaaaacaaccaccgaaatccttgattccttaattgctttaagagtagagggtggaatttggctgtcgtgagtctgtaggttacgatcatatgcaagttcagtgaaaaaggtcttgattctcttgctgcgcaaagcattatagagagtaccagtgaaggtgtaacgggaatcttcgccatgaaaattgagaaaaacatcgtagtttttgagttcattcgacatgatggatgagaagcagtagcagaatgtggcttgcttgtctcgttgactcctcctaatggccaatgcctcccgacttctctttctctttttcataaatttaaaatattgaacacgatgactatgacatcggaatatttaacacgatgccctacgcggttttgcttaatttccttgctgccccacttcgctgtcaagctgaaataaaatacatgaacatgggttgactggaccagatggatggatggagtttttgttttcttctccattttctaatcaacaaaccagtcatgtcattactatcatctccatttttaaataaaatacacaatttgtaatttttttatcaatgacaagatttgtaattaattatttaatctaaacccttaatttaatttaatttaatagttgtaatatttaaattcttatttataacagttgtaataaacagcaatccaaaagtttttttttcaaaccaaaaatgctcccgttgatagttcttgtttctcataaattatttaaattctgtccatatccttttactgttgtctgaattccaaaacgcagtctaagcaacgggagaacactcaagtttcttccacgcctatacaattcaacggaataagtacgactgtacgagaccataaactcggcccatttccacaaaacatttgatctgacatttctatagacttcattggggaacagggggcaaagacaccattttggtgctagtttttttcctgtaaacgattcagattttgaagtacaactattatgaatatctcctaataatatttaatatcgtgtttggtacacacaaggatgtcctttagtcccattttttttagttaaaataaataaaagcagtaaattgattctatgtatacgtttctcgaaagaaatgacagaaaaaaattgggagatcaaaattttttgttaacagaactcctaaaatgtttcaggaattgctctcttttcaccagtttttgctgtcacaaaatgtccagctgaattacgcatatcctatgagtgcatggaatttaacaatttcaaagccagagcttcttgctcctccaacgtaaccgcaccggtagttatacctgcattccctgaaaattcatttctttcaccctcgtcactgtcactatcaaagtatattttactctttttatgccgtctatcaacagtctcatctacttctgacccagatatatcatcttggtcgtcctcttccgcattctcagccttccatttcaacttctgcttgattcttttttctctaagccgctgacgctctataagcttgtcttccttgtcagccttcttcaaatcatctcgcatccttctatagtattcagctttttgttctgcatcaagacataaagatgatgtggcaaaatgtacaaatagcccatgcttatgaagtaagaaatgacacgtatacacatgtacaagcaacaatttcaccttcagcttcagtttgcagttgaaaagtatggacatacctggatcgagcagcatttctttgccactttgtgtgtcagctatcctggctagtggaggaagtgtgtggccgtcatcatcaaatacaaccctagtcccaagtggcctgtgtacattaatcttgagtttctttttcttcaatacacgagttgctggtctgcataggaaagaaccaaattggtaagaacaataatggaggaagaaattcaaagctccagatgaatggctcccgccaagaaatatgaaagatccaactttatacccaacactaagtttgaattttttttctattagccacatcataaggtgttatattcaaatatcaatttgtctcagcaattttgaaaccagaagactagtgtagcccctttccataatcatatataaaaaaactaatgcagcattatcagaaagcagcctaattttttaatctgtactactgtaaaaatgtatatgggaacgtacattatttcttcaatttcagatgacttaacttcgccttcatttgcagtatccgctaactgaagaatatcattttcggtttcctcatccttgaaagcaactgtgtctagcttcttcctcgaaacctcaaagatagtttccttgtctgaatcctctggctcaactaaaattgatttagttgtcacatctttagatttaattttctggtttagaaaacggattttgggggtcattggtaaacctaatgacgctgaatactcgtcaataggtagtttcataacatcaaatatgtctttatccttttggatatggatggatctcaaatatgtgatgaatgccctctgagcccgttgctgcatgtctgggtatttggccagtaaagatgccaacaaactagaaactggttgcagtagttcttgccttggctgaataatcaacaattgcaaaaacatggaaagcaaatgtcagacaaacataagactgaagtgaagcagatttaaaagtgacaccttgatgttcaaatgaaaattggaattgcatgcatactattaatttgcagggaaaatgtaccttattaaaatgcactggaacctttgctgcttttaacttttccagcatttgaatttctgaaggcaacagaaataaaactgactttccatcagatttatatcgagcagtacgaccaactctatgtatgtaagaagctacattttcaggacaatccacctacaaatgcaagagagaagtgagagactgaacataaaaacaaactttttgcttccaacaccccccccacaaagccgtaaaacttgctccaagacaggaaaccaaaagcaggatgagactcacctgaacaacccagtcaactgccttattaaaatcaaggcctcttgcggccacatcagttgagaagagaacagagcgcttctcacaaaactcagaatatattgccattcttctttcctgtttcatcctcccgtgaaggcacttcaatggtatgccagggtgcagtttcttaaatgcttcaaagacaaattttacctattaagcagggatgtaaacattatggaagatagtcaagctcaaaagagggaatttgcaccaaaaaccacatcttaaacattttccctgtttacatgaaagaattatggaaaaattcatcctaaaaatcctttaaaaattttctcattacaataaccataaccagcacaactgaaaaccataacagaagttctacgcatgtgaactacatcatgtagttacaaataaaacaattatttacttggccattgaaatgaaactaatgagacaactctcaagtttcaatcataaaatcaaactacattccctccaattgcacaaaatatcttgaaaatgatgactagccagtagccatgcattggctaagcatcaaagggtgcaacttttcaagtggcatgacagtaaaattgtaatagaaacctataatatacaattcccttcaacaagaaaaagaatttcttgaaacaggacagaaaagtggagttggagttacctgcttacagcttgaaagaaagacaagtgttttcgactgtagatgtgtctttatgaaactccacaacatatctaacttattttccaggggaacaatcatcacaatttgcttcaacagagtaggagtggaagtcacagattcttcgtgcacactcagatactctggatccttcaaacttagtcttgcaagatcttgaattgactttgtttgagttgcagagaaaagcaaggtttgtctacgctttggtagttgggaaatgatagcatttagttccttcttgaacccactgtctagaatccgatcagcctcatctagtaccaaaacctatatccaggaagtccacccaaccatcagctatattgatcaaatctaatgatacatatctgttttctggtttgacccaaataaacacgtactttggaagacaaaataaaaaatttatgctttacaagggcctaaagcatataaaaattaaatggcacctatactctgcttcaaccactgttgctaaatcacctaggcgtggaagcaaaattttctgaaggttgttaaggctagaaaatcttgacatacccaagtacaattaaaaacagacacgaggaaacagatagtgatataaaacaaacaacttaattgtaactctaatttcagagtaagattgaggttaatatatcacatataagaaaaaaagttatattaacctgcatctgtgaacaatcaaaattgggagtttcatccatgtgttgcagcagtctaccgggcgtgcaaatcaatatgttgagctcatttacacgttctttctccatgtcaacgtcctttcgaccaccaatgagaaggccagcactaaaattatggtgtttgccaacaaccttcaacacatcaaataactgaccagccaattctcttgtaggcgatatgatgatgctgccaacaccatcttcaggtccccatctctctctatacaacttttccaacacctatcattcaaaattcaccataaacaaataacaataagcacaaatactacaattcaatataccatctattcacccactacatattaaatcaatgaccttgcccaaacacgtatcagcttctcatggctttgaactttcgatgttgattttccacacttattagtaaaatgttatgattatattattatcataatatttgcattcagaaaccacgataaacaaataataacaagcataaacatcacaattcaatatatcgtattctatttactatatattttctcactttgagctaatcttgtgattatattattatcataatatttgtattagttaaataaaaagaaatacaggggaccctaatccgaagagaatggagctgagaaatgaagcacttacagggataatgaaagcgagggttttaccggagccagttttggcggcgccgaggatgtcgcggccacagagcgcgtggggaagagacgctctctggatgtcggtcatggccacgaacttggactctcttagggcgtccttggttttcttcgagagtggaaattgatcaaagcgtgacgcgccggcgtagcgcgagtaggtgttatcttcgaggcggccaacgggggagtttttggggagacgcggcagcgacattgggttcgaaccggagtccggtggctgaaactggatccatgaattcaagaggtttatctcttcctcctctgaaactcgctgttgcttgcgaaactccttcgatttcggccttctcattgctgtagcttgaaaacgaaggtgaaggtgaagatgaaaagcaacgttggggttaggtttatggtttgtgggttgcgtgttgttgcggcagaaagagtttgcagtgcaggaattgttggcggttaaagcttcatttttgtgaacgacgatgagctacgtaatgggccgagtgatgaatgattgggctggtccgattaatccattgccattatttttgtacacttttttttattttcctccatactattgtgactagggatatgattcgccttatgtttcatacatgtctagaacttgtgaggttgatgttattaacacaattctcccattaaactaataaattaattattttaaaaataattaatattaatatataacattaaattttttaatatatatttaatatatatataattttacataataaatttataataattaattttaatttaataattaaactataaattaattgtgctacttatataattttgataataattattagtggatgaaataaaagacaacaagaagaatcagacaactatctaacaaaggtagctgaagcggacaaaactctcatacttgacaaagagatgaagaagaaatttcatgtttagccaaaccaatcagcatattgatgggcttctctaaaagtaatttgaattgtactgaattagaaaatatttaaaatggatccaatgataaaataacaaaatcataatattagatcacataaactttatctctaaaatggatttaattcggatacaaattacaaccccgacaacagcgtttaccaaatttaggattaatttcggagtttgttttatttcttttccagtacaaagctattcattaaaaaaataaatgaggtaaaaaacaacaacattgtcgatcatgagtcttgaataaactagaaagtgatatataaagtagaggttaactaaatttttaattcttaaattttttttaaaattttagtttttaactatgaataaaagtttgactaaaaattttaataaaaaaaattaaaggattatgatcaatcaaatttttatttagagattaaaattttaaaattaaatatttaattaatcctatagagacaaatgagagaggagaggtgaggtaaggcatggttcaattcaagtgttgtacatggacagactcaaaagtacctaaccataataatgacgtggaacattcctaaaatctccaaaagcacctaacctataaagtgttacaaaagtcaaagtagcatatgcaaaannnnnnnnnnnnnnnnnnnnnnnnnnnnnnnnnnnnnnnnnnnnnnnnnnnnnnnnnnnnnnnnnnnnnnnnnnnnnnnnnnnnnnnnnnnnnnnnnnnnnnnnnnnnnnnnnnnnnnnnnnnnnnnnnnnnnnnnnnnnnnnnnnnnnnnnnnnnnnnnnnnnnnnnnnnnnnnnnnnnnnnnnnnnnnnnnnnnnnnnnnnnnnnnnnnnnnnnnnnnnnnnnnnnnnnnnnnnnnnnnnnnnnnnnnnnnnnnnnnnnnnnnnnnnnnnnnnnnnnnnnnnnnnnnnnnnnnnnnnnnnnnnnnnnnnnnnnnnnnnnnnnnnnnnnnnnnnnnnnnnnnnnnnnnnnnnnnnnnnnnnnnnnnnnnnnnnnnnnnnnnnnnnnnnnnnnnnnnnnnnnnnnnnnnnnnnnnnnnnnnnnnnnnnnnnnnnnnnnnnnnnnnnnnnnnnnnnnnnnnnnnnnnnnnnnnnnnnnnnnnnnnnnnnnnaaaaacatggacaatccgatcaacttaacctattcctttcatccagtttaataatacatcctctcttctttgcccttatatttgctttctttttataagaggcctaagggtgtggttaagaggtttattagattggagagaaactatctatgggtaggtttggaggggaattagaaaattgcttggacagaatgagaatatgtttggcttccaaaacagaaagatggcttagggattaagaatatctccatatttaatgaggccttactagcaaaatgaaagtggaggatgcttaatagggggaagggttgtggtatgaagtcattaaaacaaaatatgaaggatggaaaaatttaggatcaagtagagctcttactaaacaatccacttgctggaatgacttggggagggtatgtggacataatgaggaaacaagatggtttgattcacaggtggtaccttgtgttggagatggccggccatgtggtaaatttttggaagaattattggttaggagatgaaaaactgatgttaaaatttaatagaatgtaccccaattctttgcaaaaagacaacgtggtaggggtatgggtaagtggaaggagagacatgggtgtgggatttcaagtggaaaaaaaggtggtttgaatgagagggtgaggaggtggaaatttttcaggatcttactagtgcggttacattgaacattagcatcacgatgacttgtggagatggaagctggattcttcgggcctgtgcatactctatgctacaacactcaccaaatctgactaatgacaacttttacaagcatctttggcagatcaaggccccgccaccggtgctgcatttcgatggtgagagggaaattgggaggtatggcttggacgatggtgtcgtctaccatcatctggtgtgtgtggagattggaaatgatatgatatttaatcatgcatggtgtgttatctttccatggtctcttggacgatattagtatgaagtcatggatatggcttgcatcataaagtggatgatggatttaattactcgtttgctgaatggatgatctcaccaggcggacctacatacatttgaaggtgggcagattcacccctcatttcaataaatcactagtatttatcttaaaatattatattttacactccataattttatattttgcaccctctaattttatgtatttgaacctctttaccagtttaaatataagagtaagtaaatacaccatcttattttaataaaatgcaaaaaatatcatattttgcaccccataattttatattttgaaccccttaattttatttatttgaacctccttacccattcacacgtaagagtaaataaatgcaccctcttattttaataaaatgtaaatatttattttaaaatttcatattttattcttcttatcttcgtgtttgaatccaactatcccatatcataataataattatcaatttttattttttaaataaattgtcctcactgatctaggatctagatccgccactatcaccaggtgagtgcattttgaatcttgatagctttaggcacaattagctgggtggttagattttagtgttggatcttactgagggagggtatcgtacgtgcatgggctatggttgtagaagtattggggagtagcaggtagtgtgaaataggaatatatgtattgatcttgtgatactcttcgagtatgttccgttattatctatgtatgttgttttttcgagtttgatgtgggtacaccttgtgctctattccagtctttctattaatggattatctttgcctagcaaaaaaaatgaataatattggtctcaactctcaactctcaactcatgcaaagtgtattcaaatgtgaaaaaacacacattgcataagatgtcttggcataaatggatattaatgagtagattaacatccgatccaagtgaggttataaatgaccaattttttatgagtagggttaggtaagacattagagagatttttttttatgtaaacactctggttgcatgagttttacatatataagttgcatgagtgatacatatataagaacgtagttttgattgaaaatgatacataagttattataaatcttttatacatattttttaattttcgtaaataaaaaagataaataaaatacttgcaatataagtttagctagcatactttatgtatgttattctttttttaaaatgtccatagtattattctttgctattattaattaaccaatttaaattaggcataacaagatttgaacattactcaaacccttcactaattattttactccaatcaatttttatttttacttactttgttcaataacttttttactagtactgaatttcaattatttaattctaatattgaaacttcattataagtactcatgattgaagtcatgaacttgagtgctaagaataaaaaaacattagaattagcgtttcttgaactggtctattaaggtctaaaaagtattgtaattaaaaatttaagtaaatagaattttatataatttaaaatatagtatatatttcttcaattaactttattttgatatattgtttataatataagcaaaatatctactgagtatcattattaatattgagtttgttattaaaattaacaacacaataataactactataatataatcaattttgcatatttatatgacaggtaacaaactctcaattttttaaaccaactatgtttatttaagcaaatagcttattttcacactaatgatataataaatgctagatagtgtgaaaattaaatttttattcatttttatatgataatttaaaagctttttgttacaaaattacaataaatgactacaaacaactatactaacatgtttgttaaaaaaaatatgttagttaaaattttaaaaaagataacaatgaaattaccctatcataagtatacatcttttaaatttgtagttcttggtctttagattggtgtatatataaaaagtatttctctgagttcaaattaatataaaagttccccgcaaatcagaaaaaaataaaaataaaaaactaaaagttacctatttatatttatattgattacttctaggtctgattctttggattttaaaataatttataacaattaaaattaatgaaatgcattgaatctgcattggaagatttccttttgtttgattaatgctaaatgagtatacttaaaaggaatattgccttctagaaagggaccaaaacaaaccatcatacaatagtgcggaatgaacaaaatacggtaaaacaaacaattcaaacaaaccgtcatataataaggacgaacaaacaatcacactttatgtacatctatggctacttattaaataactaatgaacccacaatggagaaagagaagaaagaatggcgtccgaaagggagtcgtttgcaagggcttccaatgccgaatggatggaagaagatgaggaggagcttgaaatggctgcattgctgaggttgcagatgcataagcgtgccaacacgtcgccgtctttggatatgagcaacagaggtggctcagggaagaagaaggccaaggttttggagcagattgatgtgaggaagctgagccgcttccaccgtgaacgcctagtcaaggatgctttggcaaccaatgaacaagacaattacaagctcctctctgccatcaaggaatgctaagagagttaaatatttttccatcgtttatctatatctatctgccattgtcattaccattagatcatatttaaatgattaaaattaaaataataaaaaaatcttttcttcgtggagaaatgagatccagtatcgaagtgagatattacatgcatgaaagggtttatatatgattttacatttaaattatttgtgtggttgactgcaaaagggttgcattggatgtaccaagtatagaagtgagatacagaaacttgacaattggagccaactttgattaattacacgtgagatgtctttgaggttcatacctattactcactctcatactaacttactaattaatcaaattaatttttagtaaaaagattgattatgggttatgtgtaataacattagttcaataatattgtccgtactctagctcaataattcgttatgtgttctgttagataattaatatagaagcagaagtgcttagccctggatctcccgccattgctttatatgcttttggcatttttcgataaacttttttagaagtatttttaaaagaaaaaaagatgagatgatttttttataaacaaaaataagttctccattagctcattttaaaagctcactaatataatttttctaaaatatgagatgttatttacaaattatctaatgaaaaactcattttagcttataaaaaaactcatttaatttttgtcttcttactttctttttctagaagtacttctagaaaattttatacccaaacaaatcatttatccatgattgttacttattatttacaaacttaattgcaaattgattcataatggtgatggtggcatccagggtatgataactggcatgggaataggtcgacctcaaagacattccttgaccatcttgaataatatcagcggtgtgtcaaacctggaaggcataatattcttctgttattttacattatttattgagtaaactatcaatttgatccttgaaatactactctctccttaatggttgataaagtaagaaaagctaagtaatctcttaaatattgaaagacttttcaaattaagccttaaactttattgaaatgcatcaacttaagaactaattaaactgatgaatatcctatacgtcaaggattgcttgaacaattttattactttagggacaattgaggagaggataatagtttgggaacaaaattggtgatttattaaattccattcataattgatatttacgatatgaaatgcaaaagtatgtcattgcttgctacaatttttaacttcaattagtgtctttgttcaaagctatatttcacattacaagtggaaataattaacttcatcttaataaaacagaagaaaaaaaatagagggactgaatttggaccctctttctttgtatgatacactaaagaggtaatccagttagattaacttaagcacactgcacatatcactacaagagccaaatttcaaagaaaattgtaacaaattccaagaaaggggagagagatcacctgttgtaactctccaatcttaggagtcaaaaacaaaattctaaatgaaatctccttaaatcctatcaaagctatatttcacattaaaagtggaaataattaacttcatcttaaaaaaacagaaggaaaaaaatagagagactgaatttggaccctctttctttgtatgatacactaaagaggtaatccagttagattaacttgagcacatatcagtacaagagccaaatttcaaagaaaattgtaacaaattcctataaaggggagagagatcacctgtttaactctccttttttggccaccagagaccccccttagcatatctttgcctacaaccatatctgaacatacatcaagaccaagcactttcaaaacataatctgtctcgacattgtggtttttgccaccaacaagtgttgcctgttgagtaaaatcagtttaaaaaaaaacataaattagaggacttccctgaacttgcatatatgcatgatttttcagatattatttataagatgagacaaccttcatgaatgcatcaatttctggacttggcagtatgtttttctccttctccaagcgttcaatatttttcacaatattagaccaggaaattaagtaactgaattctgaaatggaaaataaaaataactaaaaatggcgcataacgaaactaatatattatatacatacctacatcacttgaaccttggcatctgttagcaaaatcaaaagtttgtctcactgtcagttctgacatgtgattatcagtttggctagtgtatgcagaagccctttgaatacagaactcctattggaatttttaaaggttatgcatcaattggcaatttttccattccatttaaaaatactttgcatgttttctcattccattgaggaataaaatattcctaaatctttcagcttccttcagtaatatagttgcttgctatattccctcactgactgttatatcatgcttgctgcagatgttgttgagacctattgtttcacaacttgttgtagatccaccagctctgttggatgacagcatgaatatactaagtgtgaaggaagttgatgacctactggttgtgtgcatcggtcaaatggcagtgactggtggatctgaccttttgtggaaacctttgaatcatgaggtgaattttatgatttctattcttttctactactcgttaatgattgggcaagtaatttgatactgacatactggtaacttactggcttcactatcttgtttttcattgagggaaaatgcatatgatcgttgtcctcgggaaacactgttatgaatatgactggttctactattctccctattagtttgggtgcatggatgccccaagacattttaacaatagattaagaatatgtctaacaatagaagtaattaactctctaaaggccataataaaagtgtaaattatatggccccccaaaacttttaatttaacgaatccactcctcttacatgtaaacattcagccagtagctgtggtgcagcagcaagccaacaaggtggacggggcaaatgggctcctagcaatgccagctggttcaaatgtggagtttccaacattagtcattcaaactagaaaaacgagcaaatccttaccaaaacttcctttgctagacctccatttttggcattgctaacaactacttatgaacatcacctaagcatagtaaaatcatgtcctatttgggaaaactctcaacaagaacttctaagagaataaaataagtaggtaaaatggattgagtttcttaagttaaaattaagtgtgcacaagttaaaacaagtttttcgagaagctaaatcagaacttctataaaagttgattttaacttatgagagaagcttaattcattttacgctcttttttttccttattctgtaagtgcttattgaatagtttatctgaacagggtttcagtcatgttagagttgaccttttctgctatgtttatcgggctttataaggtttaattgtaaatagactgtagcttttatgtcattttgatcaaactttagtaataatgtcaattgacgctttgtatccctgcggttttgacctaccctaccggccaatgatctttaaagatctgaacttgcttctgtactcttgcatccccatttcataatacgttagctttggtcctttgtagtcatccatgcctcatttatgtgttgaagtgtttagcccattagtttgttgttatagttttgggtattcagtaatatgtatagctcttgaatgctatatgtttgttccccgcaaatactagtattccttagcaactgaatatatctctgccttctttatccggttttttgcaggttttgatgcagacacggagtgaaaaattgctagctaaaatattgggcctcagaattgttaaatatgttgtggagaactagaaagaagaatatctagtgttcatagctgaaacaatccccttccttggcgaactgcttgaggatgtggagctttcagttaaatctcttgctcaggaaactctaatattgaaacttcattatactagtactgaatttcaatgaaacttcattatactagtactgaatttcaattatttaattctaatattgaaacttcattataagtactcatgattgaagtcatgaacttgagtgttaagaataaaaaaacagagtctgtcctcttagatgtgttcgtccaacttaattaggattaaacaagtaacaaactctcaattttttaaaccaactatgtttatttaagcaaatagcttattttcacactaatgatatgataaatgctagatagtgtgaaaattaaacttttatttgtttttatatgataatttaaaagctttttgttacaaaattacagtaaatgactacaaacaacgatactaataacatgnnnnnnnnnnnnnnnnnnnnnnnnnnnnnnnnnnnnnnnnnnnnnnnnnnnnnnnnnnnnnnnnnnnnnnnnnnnnnnnnnnnnnnnnnnnnnnnnnnnnnnnnnnnnnnnnnnnnnnnnnnnnnnnnnnnnnnnnnnnnnnnnnnnnnnnnnnnnnnnnnnnnnnnnnnnnnnnnnnnnnnnnnnnnnnnnnnnnnnnnnnnnnnnnnnnnnnnnnnnnnnnnnnnnnnnnnnnnnnnnnnnnnnnnnnnnnnnnnnnnnnnnnnnnnnnnnnnnnnnnnnnnnnnnnnnnnnnnnnnnnnnnnnnnnnnnnnnnnnnnnnnnnnnnnnnnnnnnnnnnnnnnnnnnnnnnnnnnnnnnnnnnnnnnnnnnnnnnnnnnnnnnnnnnnnnnnnnnnnnnnnnnnnnnnnnnnnnnnnnnnnnnnnnnnnnnnnnnnnnnnnnnnnnnnnnnnnnnnnnnnnnnnnnnnnnnnnnnnnnnnnnnnnnnnnnnnnnnnnnnnnnnnnnnnnnnnnnnnnnnnnnnnnnnnnnnnnnnnnnnnnnnnnnnnnnnnnnnnnnnnnnnnnnnnnnnnnnnnnnnnnnnnnnnnnnnnnnnnnnnnnnnnnnnnnnnnnnnnnnnnnnnnnnnnnnnnnnnnnnnnnnnnnnnnnnnnnnnnnnnnnnnnnnnnnnnnnnnnnnnnnnnnnnnnnnnnnnnnnnnnnnnnnnnnnnnnnnnnnnnnnnnnnnnnnnnnnnnnnnnnnnnnnnnnnnnnnnnnnnnnnnnnnnnnnnnnnnnnnnnnnnnnnnnnnnnnnnnnnnnnnnnnnnnnnnnnnnnnnnnnnnnnnnnnnnnnnnnnnnnnnnnnnnnnnnnnnnnnnnnnnnnnnnnnnnnnnnnnnnnnnnnnnnnnnnnnnnnnnnnnnnnnnnnnnnnnnnnnnnnnnnnnnnnnnnnnnnnnnnnnnnnaaaaacaaattgattcagttataatttattatcataattgaaaaaaattaagaagtgaatgtcaaatcatttgcattgagtatcttaactgtgataatattgagtatcttaattgtgataataaggctgttcatgccagacaaagtcttgatgctttcatgcaacccacaaattataaagacacatgcatgtttaatttccatcatttgaaataaaaatcaattttaatgtggaactaatagataattttataaaaataattatttattaaatatttatttgttaaaagttgaatatttaaatgattaaagtattataaaaatagtctccctgtgataattttattacaagttttttataaaaaaaagtattttttatcaatattacaacataaagagaaattaagatatcaatcacaagatacaattgaaagttgtttgtaattgaaaaaatgtttgcaacaaagttttatcgtgttatacatttaattgtattttatgataattaatgttagaaatttaaaagaacaaaaataaaggtgggaagtaatagatatgaaaatattgatatgaatgtatgacaaaaaataaaaacatgaataaatcatgatagtgtacaagagataggtgtaagattaaaaaaagtgtcaacaaattttctaagactagaatcggaaattaatgtttgggagaccaaaacgtggaggaaattttttcattaatctcatgttaaattcttttataagcgaataattttaaattcttatcagatctctttttagagacttgaggtattttcttaattgggattccaatgtttatttttatcaccaatttttacataacacacataacataaataaactcaaattactaaaaaaaaatatttgaccattgaaaaaaaaaatgtgatgacaacagtaaaagatgaaaaatgtcataaataataagtgaaaaaatgtgatgggaacatgagaagaaagataagagaaatatcattattaatattgaaaccgtgtttaaaaataacaacaataaatataattaattttatatatttaccccagttaaactgattattgtcaaatttgttcgttgacgatagcttgtgttttccattacaaatgttttgtacgagggatagggatggtattatcatggcttgagcgagtgcggtgtggcgattttgtctctctgccattacaacttaattatgcagcctccaactgcttctacatttcaccattcatctttctctcgaagccctcttcaccaaaatcaggtttcttccattttctctcaatattccttttggcttatctcattttactctctctcggagtttcttttttcatttcaaagcatttcctcagtttcagaacttttttacttcattcaaagcatttattgttacattatatcattgttttctattgctttccatgatgcacaaataaagttttcattttgatgtgtatgtttccaactttttcttttttgtagtaatagcgccgtgtgaaatgtgaagcttatgtttgtgggccagctttgtgtgaagtttttgacttttgggttgttgttggtgacgtagaaagggtgaattggattgaattagttgtttgtagtttgggggaaggacacagtaaattaaaatgagtggagtggggattgatattggaaatgagaactgtgtgattgctgcagtgaagcaacgtgtgattgatgttttgttgaatgatgaatccaaacgtgaaacccctggtgtggtgtgctttggagagaagcaacggtttatagggtcagctggtgctgtttctgctatgatgcaccctaagtccacaatatctcaagtgaagagactaataggcaggagatttgcggaccctgatgttcagaatgatttaaaattgctccccgttgaaacttcggaaggcccggatggtggcattctgattcgcttgaaatacttgaaggagactcgcacgttttccccggttcaaatagtagcaatgctctttgctcacttgaaggctatagctgaaaaggattttgagaccgcagtttctgactgcgttattggggttccatcatactttaccaacttacagagacaaacatatctcgacgcagcagcaattattgggttaaagcctttgaggttgatccatgattgcactgcaactggtcttagttatggagtttgcaaaacagattttcccaatgcagctcctatttatgttgcatttgttgacataggtcattgtgatactcaggtctctattgcagcatttcaggctggtcaaatgaagatactttcacatgcttttgacagtagcttaggagggagagactttgatgaggttctgtttagtcattttgcagcaagatttaaggaacagtacagcattgacgtgtattctaatgccagggcatgtaggaggctgcgtgtagcatgtgagaagttgaagaaggttttgagtgcaaatgcagtggctgatctgagcattgagtgtttgatggatgaaaaagatgttaagggctttatcaagagggaagaatttgagaatttggcatcaggattattggagaaatttaatattccctgctacaaagcattggctgatgccggcatgacagtagaaaagattaattctgttgagttagttggttcaggttcacggattccagctataactaatttattaacttctctatttaagagagaactgagccgcacgctgaatgcaagtgagtgtgtagcacgtggttgtgctctccagtgtgcaatgctcagtcctattttccatgtcaaagaatatgaggtttgaatattgaaaaaaacacattgattcttatcctatctatatgatatgtatatataggagagtagatttttgtgtttgtagattcttaggttagaaatgtaataattactaaatgaacaaagttgttacataggtgctaggtttattttctgcatttaatttgtctatcttaattgaaatatatctaacttcatagatatcattaatcatgtgtttttttttttatagaattttgcattagcatgtattactctctataaaattaatgtaatttcctgtgtttgttcagatccaggattctattcctttttccattggactttcatgtgatggaagtccaatttgtgaaggattggatggtgtactcttcccaaaaggccaacccattccaagtgttaaaattctaacatttcagtgcagtaatttgctccgtctggaagcattctatgctaatccagatgaattaccacctgggacatctccgaaaatcagttgcttcacagtatgcctgctttagaattttactatgatgtgaaggagtttagatcatcttgtccgtgattctttgttattaattttttattaattattaccctctctattcttgcttctttggggtgcttcatgaaaggcatgtggtatagtctctatgagcttattcatcttcttcattttactgttttggtatgtttaattctacaaaaaaaaatagtatatactatatagtaatcatcatcataattgcagcttttactcttgaattgtaagtctaggactcagttatgtataaagctattacttgttatacatgtgcttgtattttatcatagtttcaaccgtggattttttattcaatggttataaatgcactttattctttagaatgcattccctcactttagaggagtcaaatccaagacctgcaatgttgtttgaagttcaatgttgagtggtaaaaactcaacaaggaataaagctcaatattgccaactcaagaatgttatgatggataagtagacacacaaggtagaattaggaatgattccttagaaagttaggcaccatttgttgtagaaaatatggtagaatcgtgccttaagtggtttagacacatgtgaagacttgtagaagctctaaataaagagagtgaattagatggaagatagttcaataattagatgtagtaagagacgaagaaaaactataagttaaatcattaagaaagattaagatttaaatggtttgtttagacattatttatgataagacattatggtgtttttgatccatgtagccaaccccaccttctggtaaaaggctattgttgttgaatcttgggacaatgcaatagacacctccccctttcttgaaggagcgaaagacttccttattaaatggccttgctgaccatcgcttgttctgatctcaaaggaagtcattgctgtaaaagtgttaggtatagcaatatgagaatctgtaggtgtgcacatgcttgaacaaatcataatgttaggagaagcagatatggtggatctaacaccatccatatatctactgtctaagtttctcaaatggagagaaatgactgtatttaatatttagcatcttcaatgacaattggctaacatttgctaatgtctattctatattataagacatctcaatattacaggacaatgaagttataataattggttgtgagatactgccattccttgtgccagtgattaaaaagtgttatgtatgcttatgcctacaccttgtttttgtatgcttatgcatttgtttgtcatttctattcagattgatcctttccttggatcccatggaagtaaggcgagaattaaagttcgagttcaactaaatttgcatggcattatcagtattgaatcagctacagtaagaaacctcaattttatctcttcatatcgcattattagttttctgagagatctttctatgcacatggacatttttgtctttcagttgatcgaggatcatgtgaatgattcagttacaacaggtgattatcattcaaattttgaagcaatgaatgttgaacctgtttctgagacagttgaaaatgtcccagaagattgtatcaataaaaagtgtgaagctccacatcattcagtaagtactcccatgttgttctctctctctcccctgctcacctttttttactggaagatatctcagatattagagatttctagcaaattgtccttttaacacgaacaattatatggctaaattttaattatctgattatttctgatactgaatctgtaccatgtctttgactgtcagtctgtcgcaaccgttttttataatgtctgtgatgttgtatatgtacatttttatcttgtggagattgttttgattgcagatatgattcatgttggtgttttgagaaaataagtgttactatcatgccttgttacaggctgatggtacaaaaaaaggtaaagccaacagaaggcttcatgtacctgtgagtgaaaaaatttatggtagaatgaccaaggctgagatattggaagctcaagaaaaagaactccagttcgccgatcaggacagaataattgagctgaccaaagacaagaagaattcgttggagtcttatatttatgaaacgaggagtaaggtacatattcaatatcttaatgagatgtagacatgactggcttctctgattcaattacattgtataagcggtcacacatttcttctgctaaaatagataattgttcattgtatgatcctttttttcttctttttcatatctttactgtgaggtgttccttcttcaaaaactagagccttaaattttgccatgtaaatatgaaagtattgaatatatcaaaatgagaaaaagctgttgtatatagtcattgaagaattgatttttaatgacttctgtcatgactcaagtaaatgtaagggtaaaactttgtgaagctggggatggtctgctgttatactttgtaataacatctgcataggatataccgatatagaattaaaatctgaatccttatgccttttcttaccgttgattttattaaagctgtattcatgtgtatgctctacttttcattctgtactggtatttaaatttatttgcatgtatgaatagctattcagcacatatctaagcttttcaagcgaacatgagaggaaggacatatctaggagcctgaaagcgactgaggattggctttatgatgatggtgatgacgaaactgtagatgtttattctgcaaaactagaagaactaaaacaggttacttttgtttctccaatctccatgtttcatccgccatacttcttgcttataatctccatcttctgcagctggtagatccaattgagtttcggtataaagacacagaagcaagaccacaagctacaagagatttgttaagttgcattgtagagtatcgaatgtctgtagattctcttccaccccaagataaagaacaggtacgacaataaactagtgaataagtataattgtgggatgtttcccttagtatcagtttttaagtgacaactttctttttcagatcatcaatgagtgcaataaagcagagcagtggttaagagagacgaggcaacagcaagatctttaccctaagaactttgatccagtattattgtcaagtgatatcaagagcaagacagaagatttaaactcgtatgattttaactttctgttttccttttcagagatgcataattgtagggtactatgatcattcatttgggtcagaattatacccctttctgaagcaaagcattgttcatttgctccaatttaactccattgtcattatatacattgattttatctcaaaaactaatgaatgttctattttgatggattttcagagtatgccaacagatattgaaatccaagggttctccacttccaaaagaaaagggtgaagacaagcagaatacttctaatcatcaatgaagacgatgaatgaactgaaggcctaaatttttaatagcttctgacaaacgtgaacttttttttaacacttttccccgtccggggagttgaaagagataacttcaaatacagtgaaatcattggtaattaccggttcaatctgctttttatatatatatattatttttggccccacgttctactaaagccatccaataagttagtacgtagacaaccaatcaagtagtttattttttgtcaagggttgctagattttatgctcgtcaacaagttttcaatttaattccaaattgtattcaatctatcattttggatgaaataaaatcgtgaagattggacgcttctgcgaaactgaccacctttatggctttatctttattcgctattaacaaaagcaattttgttatcctttttattaaaaaattaaaaggttacaaggattttggaaaattaaattccttttctatttttctagtgaaaattcctaatttttgaatctgtacacgtatgctaatctcacgtatgtcctaatttaagtttccgctcacaaatattatgtcctaatttaagtttacatcgtctgtaaacttcagtatttatttggtacatgtgcattaaacatcaacaaatgaagccaataaacagcataagcaacaaaaatagcccaaacaattcaggcgaagcatctctatcctccgctcaagatagacggaataaaaggtcttcttgatgtcttcatttacttaaaatttgctatcatttctatcgttccattactttaatctacaaacaccagaagtaaattatgcataattgacatagcaacaagctatcataataacacagaaccaagtggtgaatcaagatggaatcgaagcattattgggaatcctaataaaaaaagtgaaacattatctaaagttacaatttcatgatggccaaagacattaggtccttgtgcactgtacagaactacttgcataagctcacaatatctacttgccaggattttttagaatcaaatcttcactaagcaacaagaccccaattcagtttcctcgtgcgatgctgcatgctggatggctggcttccttgtccgcatccaacacatgataccggaagtttagggcaatttaacagcattgaacctatagggtattgctagtcataagatccacaagtaaattatgggatgtggaccaggcggataataaatttcttgccatcaagtgttcagtttctcttcttggcatttgtcgtcttggtaccttttttctttcttgatttcttgaatcctgctccactctcctgtaaacatcaaaggcattcagtgctacatcacaaccaaaaggacaacaaaacatcagaatggtatgcaagtatatgtaccttccgatattgtctataagcattgcggcctgtcaactcctccccacttttgttgacataaacctgcaaggggggataaagaatcaggttctgatagatttatacaatatgacaaaatagacttaaaagcttttctcaattatggttctggtcctataatttcaaaaccactaggaattggtccctgccattaaacatcaagtaggaattggtccctatataacaattaatcttaatgtcaaaagaatgtttacaaaaacaatgggagattgagtatcactatctagtgttacatagttatattggaatgatgggatcgtgtgcatcaaatcatagaacaatatttccaaaaaaaagaggcattatgtaatgtgataatttgaatttcattgcacttatttaaatcttaagtaacatactgtatgggttttttgcatttcagttttaaacaacagcaaaacagctcgcataacttcttatgaccagcatctaacatgagaaaagtaaataaatttaaccagttaatacttaataacattaaaaaaaaaataaagattttttctcatacttttcttccttctggtgatgtaaaccaatgaccagcagattcaccacttgcttgaacacgccttttgcctgcatcctttggcaaactggtgcagctcctgggttccacccagcccccagaagcacatgattggttcgcagggtttgatttgtttgctttactattactttttgagacactattcttagtgccattcctctttgttgctttctttctagaagattccccatggctgaatggagaaacaattttgggatccacccagcctccagaagcatcaaaagatccctcaacattcaaattacttgatttgtttttcccccttgttgagctattaataaaaccattttgaactccctgcatgtttgaagctcctccattaccaaattgtcccctgaaatcaaaatacaccaaaacaatatgtaatacaaaatgacaatcactttctttttaaatcattaccataagattaaaacaacaaatgaacatgggttacgacttacatgtaatcaatgtgtgagaaattacgttgctgattcactgtgttgatggtacctagtggattaaaattccgcaggcgactgcggactaactgccgaattctcggatcctcatggaaaaaataagtatgagcgggatgaacagggtctgttgattcacatcgttgttgatccctctggcagctagaactaaccccaggattcctctcattaaaacttttagacgaatcaccacccacttccttgcaattggcagaacgaaagtactcttcacatatctcattgaaggcaggcgtcgggacagaaacattcttcaccggcaaaaaatccttccatagatcatcagcaggcgatgttttcttattttgttctaaatggcggttagggttagctttattggcaccagcaatatcaacatcaacatctgaatcatcagaatctgaaagcaactgaaatttacaaacagaaacattcttcaccggcaaaaattccttccacagatcctcatttccattcacatcaaccgaagttttattatcttgttccaaacgactgttagtgttaactttattggcaccaccgacatcaacatccgagtcatcagaatctgaaagcaattgaaacctattaacagaaacattcttcaccggcgaaaaattcttccacagatcctcatttttgttctcgtcagcagatgttttcttctcttgttccaaatgactgttagggttaactttattggcatcaccagcaccaacaccaacatcagcatcatcggtgtccgaatcaatcaattgaaaccttcggagaggactagtggttaacttgggaaacatcaagccactcttccctgtctctaacctggcagaagccggaacatcattggaaagtacctttcttttcctatccctgaaagagttgctacacgaatgaggggtcaaaaccccacttccattcaacgaaactttcgagctgctacacacagaatgattccgattccatgccgatggaaccgcatgccctaataatattacaacagataaataataaggaaattattaatattattatttaaaattgaaaagccgagagagaggtgaaatatttgaagtgttagctaacctgaccttgatcgggatcttcttgagaggagaactcctcgatgtcgtcgtcggcgtaggcatcggcatcggggtcgagatacggcggcgggggcccgcgacggaggcgtttgaggagggggcgcggcgggtcgggtcgggattcgggatcggagtcggagacatgaagatcgggagaaagaggtggatggattggggaatgggggggcgtatcgtcgagacctagggaaaatgagggcacttcgaaattcgccatggaaattgaattgagatgtgtgtatgtaatgtatataaaggagggtttaggggatttgaatttgggggggaaatggagggaattgaaatttctggttcgcgggtgcgcgactgaaccatcttcaactctttttttctgtcttctttttttatatgacagaatcaagatttacataactcactttgttgaatcaactgtaagtttcattttttattctgtaagtttctttttttcatttacaataaagttcttttttattctgattttattgcttttgctggaaaaatgttgtgaacgtgataaaagtaatttttttttcttcagattttatttaatatttagcttattaatttattcaggataaaaggcattatttttattgttattataattataaaaataaccacaaacataataaaaaattaagtcaataacagtcaaactatctttgtagatcaccacatttttatgtttttcagatggtataatgtatttaaatattaatttgttatatcaattaatttcaataaacattaaataaaatcaaaatggaaggatatgattataatttgaagaaaatttaagtgattaaattaacacaattaaaatttaaatgaccaaactacacaattatgataccaaaaaaactaattaaatatcttaaattataacatttttacataatcttttaaaatcataattcattacattctttaagaatgcaattaaatcttctttttttcctctaaaaatatattcttttaaaaaaccaatgattaaacaaatttaattgtannnnnnnnnnnnnnnnnnnnnnnnnnnnnnnnnnnnnnnnnnnnnnnnnnnnnnnnnnnnnnnnnnnnnnnnnnnnnnnnnnnnnnnnnnnnnnnnnnnnnnnnnnnnnnnnnnnnnnnnnnnnnnnnnnnnnnnnnnnnnnnnnnnnnnnnnnnnnnnnnnnnnnnnnnnnnnnnnnnnnnnnnnnnnnnnnnnnnnnnnnnnnnnnnnnnnnnnnnnnnnnnnnnnnnnnnnnnnnnnnnnnnnnnnnnnnnnnnnnnnnnnnnnnnnnnnnnnnnnnnnnnnnnnnnnnnnnnnnnnnnnnnnnnnnnnnnnnnnnnnnnnnnnnnnnnnnnnnnnnnnnnnnnnnnnnnnnnnnnnnnnnnnnnnnnnnnnnnnnnnnnnnnnnnnnnnnnnnnnnnnnnnnnnnnnnnnnnnnnnngatacatgtatttaattaccatgataaaatttaataactttataattaattattatataaaaaattcattcacacctattaaagtgaaaaagattcattctgatttattcacaaattaacattcacaaaaaacttttatatccaaaaattatttttattattttcctctaaaattaaacacatcataattaaaacttttaaaggtagaaagctttccttctcgtgtaacatcataaaattaaaacattccttacgttaattatcacctcgacttaattattatcagcaaacaaaggaaaaatgctaatttcaatttcattgtttttttttatactttgacaacattaactatcaaaatgaacaataaaggagacaaacagaaagaggaaaaggtccagtaagtattaagttatatttttttgtcccggaaccacaaatcatccttgccacctcctaaaatacaatctacaagaaatcctaagcaacatacacaatgatagaaaatcaaaatcttgagtagataatgctatcatctatattatatgacgattttttttcccatcacatttgtcctctgaacataattgataaagtacaacacatgctacatgcttctcataattttctcaagaccctacccaatgaagaagggcctgtaatcacagatgacaaagcgagctatttcccaagatatcccaggttttgaggaatttagcacaagggaatgagaagattatctgcttttaaagcttaatatgaatgataatgaagaactgaaataaaaactagcatgaggcagaaaatgtgcatctattcatgacccctcatcactgtgagcagatttttccataaagcagcatatttgtaccctcacaatctaaaatgaactgcttttcatcaatcatttatcaattttacaggttggcaatctgtgcaatgcctatgcctaaaactaaatcttctgtttaagaacatggcgcaactgaaccttctggctttccattctggcctccataagtctggctttcaaactattcttctgtgcagtgcgaggaatgcatcccttcatgccttgatgtgcatgtggacttcctgactcgggactcaactggtatagaaggtcttggggactcagcccacctttacctgatccatgatcaggagacatgatgacaccattagataacattccatttgaaagtctcccatttattccctccaaagagattatcttgtaattgtccccattgtttgagtatgttgacctccaaagcttcgttatggatgataccttttttgcttgcttcgttggtatagagcacacttcacttatttcagttattggtgtctcctcacctgcagtttcttcccattcaagtacacttctccctgagacgttactctctcggtgattcctgttcaaagatcggctactcccttctggtgaataacttgagccttgatcgtcgacatggctcacagtctcccatccactttcatctccttctatatccccattatcatccataaatacatcagaacgcctctgaatgccacctttacttattgcattggcttcaggactcaccatgtcaatattcgaggcatgactagcaggactgtgagaaacacatggttcaatctccctcttatttacttcaccaaaatttgcatcttcaaaaatggcaaaaatgtcatcagagttagggggttcatatgaaaatcccttaatgtcttgaatgttcattgcagctgcagcctgttgaagtgactgtgcctctttcatgtccattgtgttcggctctgtgctttttgacctgatatagctttccaaatctgcaacgagtctattcatctgtgcatacttctcttcaagagcaactttagcatctatcaacttcatttgaactcgttcttcacgccatacttctgccatctgtaacatcttgctctcctcttccacttcttccctgagtttcatagattccctcttcaatgcttcaacttcagccttgtcttctccaatttccttggcaagctcatcacacacttcctcgatcaattctctggccttcctttccttctcataatcctgcatgtagcgctttgcagagagtttgacatctgccaactcattaaccaacctcgaattgacaatttcaatcctctggcgatttttcctttctcgattcaactctgctttaatgtcatcaatgtatgcgcggattttctcatgctctttgcttctccattgggccctttcctcactgactttcttcagaaaatgctcaagcttctttttggaggagcggtgttcagtctcaagttcctgaattcgtgtttgtgcctgctctagttcagcaccgagagccgacacaacagatacagcacttgccttttggtcaagatgtttcatgtggctgttgatatgctgcgcttcctctgatgtttttgaacataaaggattccattttgttgcaccctccatttcattgttgggaagctggaaacgttcaggctgaatagcataaagtaggtttaaaattagcactttaattgtctgctctttcacttttagtgtagaagcagaacactttttaaaactcttttgctcatagacattggaaaagctaatttcaccatgtaggtttacatgaaaaatgttttatctaagccatctctatactgttatacatagcatgggtcaatacaacaatgagcataatttgtttcaaagttcaaattgggtggtatcaacccataatatgcatgtgtttgcatgggcaggcctttgaaatattactaaaaatttccacaatatgaaatcataaacaacacgttgctatgattatagtttgtcactatctataacttaataattagatgattgatgtcattttcacaaagatgattaaaacaggtaattgcatgactgagcaatgggatattgggatcattgtgcagtacaggttgcagttttaacttgagttattatgtgtatatgacattcagtcaataatcttcaattacaataccaaagagctgtaaaactcctaatggttatattatattgatattgaagtagtaagaaaaatcatacctcacagaagtgtccattctttgtcccaaatatggaacggggactttgagatggattcttcttcagatcagaaccatgggtcatgccattaggatgaccgagaaactggagccctgcgtgaccaattccattctgcagataagtgtcatcagtgatcagtaatgagaaatggaaacctatgaaattaatattgtaaaccagctacattgatctacaaacgaagacaataataaagtgcatggaagataatcattctctaattcaactggaatgtacagagaacaaataacagaatctcatataaaacgaagactcaactaaagtcccaacttactctcaaaaagcacaaaactgacaaaagaatatgagttcatataagccaatattattacacagcatgtttgtttgacattctgccaaacaagacgcaatattcaatgcactctggatggatatgatttaatgcagcacgaacggaagcaactgattcttcctttctccgaacacaagtttgcgtttagggaagaaatcttcaacataacaataattatttacaaagacaaaccctactcaactcatttctccaatcattacaaagactaataattagtcctccaccagaaccacatcactcgcgagaaaactaaaaaaacaaaagcatttgtatcttcaaaaggcagctatttttaatttcatagaaagcctaatcggctaatccctaactctaacaccaaaacaggaaagtgaacaataatgacaaggaaccaaggatagaatctgaacacccacgattcaaaatcaagcaacaacaaaatcatcatataaaaataaataaaccccaacaataaactattaattcttttttctccatgaggggtggcctacaatacagtagatgaagtaacctagtagcatgtagctgcaaaatcacatttaaatcaaaaacaacaaacacatgcaagatgcaacaacacgcacacgggaacgaagaaaaactagggatcccaaacaacagaaagaaagaaaaaaacaaaagggtaaacgtttgagatcccacagtgaccagtgtcatagacaaaacagtgtatataagcagagcaaaaccctcgcagcaaaaactaggttttgcgacttaggtccagacccagagtgtaagaagagtagcccaagttatgttccaacctaccttatgttccaaccccttccggccatcacccgtggccgtctccggcagatgcaaccgccacagcccggcggctagtctcctcgccgacacggcgacttcggcttgcttcttggcgctccggcacgttctccggcgggacccagcgacggaagacttctggtcgtcttcgagtggatcgtaatggatcttccacttcaaaagaggggtttcgggtctgctccgtttgccaccgtgtctcctcaaccgtgtccccggagtcctcggattccgccgcagaaatggcttcgccggttcaagatctgagtcaggcgaagggttgttcacgctcctcgaagcaatgcccgccggaaaactccccttgccggaaaacttcatcgtcgccggcgagtctcagccatttaatcaaacaaacaagagttacttgcgagaatgaatggcccaaagagataaaatggaaacagagtgtgtgtgtgtgtgtgtgtgtgtgtgagagagagagagagagagagagagagagagaggagatagaatctgtgtgttgttggagtgatggagttcgtgaagtgtgtgtgtgtgagagagaggacacgaggaaagtacagaagagagagagggagggagagtttcactgtttcagagattttgctgagaaaaagacgagcacagtgacaatacaaatacacatacgcaaagaggtgtacgtctttccgtatgtttatacggtcaacgtatctgctatcagttatcatgattccacgcgcggggaaatgttatacgatgtcgtttggccctacttgatttataagctacgatgtttgttaaggctgctggtggaagagacgttctgattttaatgatctaaggatggtgggggggtttcttttacattttatttattaggatttatttcaaggacaatgacgttaaaatattaattaatttatatgtgaaaaaagatattttaagatgaattcaagaaagatttattttatttaaataatgaaatatatattattttaaaaaattggatcaatttacatttcaaatcaattttattcatttttattttttattgtttattactttcaaacataattataagattttagagttcacacccttttaattgttccttattaatttttttgtgtgaattaggatatttttaattgttttctatcaactaaattaatatttgttaacagataatttcatttaagttaacaatatttttaatataatatagagaaaataatatttgtttacataatatagaaaatcagatatataatatctaaatgagtaaatgtcaagggagtaattgtaaattctcctgacattttctattgatagggatgacaaaaatacagtatctaaattaatcattaaaaaaaattgattttaccatttatgtggttaatttgacttttttttaatatttttagttataatttgaattttaatattttttgtaaaagaaaatattattaannnnnnnnnnnnnnnnnnnnnnnnnnnnnnnnnnnnnnnnnnnnnnnnnnnnnnnnnnnnnnnnnnnnnnnnnnnnnnnnnnnnnnnnnnnnnnnnnnnnnnnnnnnnnnnnnnnnnnnnnnnnnnnnnnnnnnnnnnnnnnnnnnnnnnnnnnnnnnnnnnnnnnnnnnnnnnnnnnnnnnnnnnnnnnnnnnnnnnnnnnnnnnnnnnnnnnnnnnnnnnnnnnnnnnnnnnnnnnnnnnnnnnnnnnnnnnnnnnnnnnnnnnnnnnnnnnnnnnnnnnnnnnnnnnnnnnnnnnnnnnnnnnnnnnnnnnnnnnnnnnnnnnnnnnnnnnnnnnnnnnnnnnnnnnnnnnnnnnnnnnnnnnnnnnnnnnnnnnnnnnnnnnnnnnnnnnnnnnnnnnnnnnnnnnnnnnnnnnnnnnnnnnnnnnnnnnnnnnnnnnnnnnnnnnnnnnnnacccaattttacttattgctcatttagtcaaattgaaatgtatattatttactttgaaataatccaaacattgcaaaaaatgataaggtttaaaattacaacctctaaaaaaagtttaaaattacaagttcgtattacttaaaaaagaggtggatttgttcatttatttcatatcatagagattcgatttactgttattctcgtagacaatgagtatataattaatgaagcaatcaaacatttatgtcatcgtcagttttggccattggccaaatcagaaaataaaaacatctaacaggaatcaatgaaattagaaacaaaaactattagaaatccaaatttgaaagaaaaaatcctgttgattttttttcatttttccctgcaagtctgaaaattgaaatataacactatggtatcgtcgcctataaaataaaataaattgaaatataagagatcagtgataataattgttcaagcatccagaaaagaaaagggtacaattttccatgcccggcgtctacagtgggaaagtaaggtaggtttcccactgtgcgtaagtaactgtgattttgagatatatgatagacaagcatatattagatttttttttttttttttacataatgactcttcttcttcattagcatcatcgtcgacctctatttgtcgtcgttggagatgatttctcacaacatcatttttttttttcctactttcagtttttcatttccctttcttttcttacgctctccttctccaaccactgagcgcagatccgaagtgaaatctaaatatgaaccaaacctcaaacattaatccaaagcaaaaaatcaatcgtacaaaaaaacacacactttcattcatgaaaacccccaaattcaagcgaaatttgagactctttcgtggataggccaaccccagatccgcgacaactagcatgcgtcatcgacgccaggtcgaagatcagtgcacgcaatcaaaaggcgtaaacttagaaggattaatctcccatttagatctcattgttggaattaactggaaaaagggatggggaaccaaaggtgtagtggacaacggatgacgacacctttttgtaccttccttcacaaaagttccaagcgatgtgttggagtacgatgtggttgacaacactggtggcgttgttgacgatgaaaatcttgtcgacgtggtccttgaagatggttgagattggaggaaaattgttctaatgtgtgtaaacctatgataatcccaaacataccaaaaaagcatatagatctaatggacagtaattctttcccacggtttaggtctccaacgttagacatcgccctcgaaccaaatgcatataactaaaaaaaattagatgttcaaaatattcttctttatgcaaagataggaagagaaattttgtaagcagttttacttttgttaaacagattgtttttgaatttttctttatgcaaagagaggaattatataagcaattttattcttgtatacccaaaaaagttattttcaaatttaaattcataattaaaacaattttattgttgtgtgtagtgttattgaaatctgattggatcggtcggtctgaccggttgaatcggaaaacgatctgattttatcattaaattgattatgcagtcgacttgatcaaactcgatcggtcggattagatcagcttgattttttatgtacttttttgagatgtgtttttttggattttggattattatcaatagttattttgaatttttgaatatgaataattttttttactcaaataatattaattatatatttatatataataaatatatataattttaaatttttaatatatactaatttaaatcgattcaattattgatccattaattaaatcactaaactattaattcattatttcgagtagttgaataatcgaatcagttttcctaacgagactcacttcaataaaatgcatatgtacttcaataaaatgcatatgtttatttgaaaattgatcacgcgcgaggagtcggtcgtgtagggcacttcatagcaaagcaagtgtcgtcagtgtctgatctatttgttgcttgcacacttcaatatctactctgtttcgccctagacaaaaaggcatccgagggagactccacgtggcaaccaaagagactgtcacgtcgataaatacaaaacgtgcgctccaatgctccatattaaaaaaatacgctttcacatgggcttcgaaattgattaatactatttattttaatgagccaaccctctataaagtggcataataagtgataactttatttttttctttgtttggtacgacttcaatgcagaattagatctggatagcttattaaaattaaaaatcttaaagtaaacaactggaaaaatggttaatggctgcgcatcctaacttgattttcattttcattgccattgttaggtttccttttttctctttaaccatcattggattgtaagctattatatgaagggttttaacttttaattcaagtaatgctaagtaaattaagaaaatacgtacaaccaattggatataaattcttttaaattttttcaaagatgcatgcaaagcctaagtgccaaccaaatacatgggcagaaactgaaagaaaaaggatacattcacagaatgtgaggttctacttggctcgtcgctcttgtggggcattaccatcatgggtccaaatttaatttatacgtgattctttaccattttattttttacttttctatctggagcatgtgtaatttaaattttcgttctaaattatgagctaggttggacttcctcagaaataaaatgtttgttgaatagattttaaaatgcatatatttattacttactgtgtgaatgctattattttctaaatgtttattttgttgtttgatttagtttgattcgtttcaataaatatatgaaattaacaataatattcctttaatgaatttttttccctttgatagaagattatttttcttcgctaaagatgtgatcttaggaagatattttaaatatttataaaaatggagtatttatttttatttccgttattatctttcatttatttgtataaatatgtgaatgaaataagacaggttaagatctttttgtttcccctcatcacgggtaatattctttgatgtttatcacaaactcataaacttattaattaagtattctctagatcttaatcttactctccaaaaaagtattctctttatctttaattaacattaatagtttttttttacgtaacctgagtagttgtcttgaacaataaaattaattgatgtaaacataaaatcgttcaagtgctttgctatataaacttttaggttattgttgctttaattttatcgaacaacatagacatttttttcgattattatattatatgaaaatatataatgtgaaaaataccagttgatgcaggatcacgatgtacatatattgtctacatgcatggaaaattggaaataacaagagcccacgttcagtggggacttcatgtccataatcagcattgataaaataatagactatgtacgtgtcaggactcacgtgcaatgatgaaataatcttttcgtagaaagatagattatatttatataattaagaaaatactacataattatactatttttttcagcatatggtaaaaatgaatgtgaaagaaaaaaaaatatattatagaaattattttagaagttttttttatgaataatataattctaaaagaaatgataattaccgatagttataattttgttcagcaaaaaaaaatgaatatgaatatttatttttcttcaataaaatattttcatatatacagtcaaaattacccaaatgaatatgaatattgtatatgatcaaattccgaccagaaaaggccacgttggcaattaacaaattatcttttacgcagctttttcgtttttttttttcaccaccttttactcttgaaaannnnnnnnnnnnnnnnnnnnnnnnnnnnnnnnnnnnnnnnnnnnnnnnnnnnnnnnnnnnnnnnnnnnnnnnnnnnnnnnnnnnnnnnnnnnnnnnnnnnnnnnnnnnnnnnnnnnnnnnnnnnnnnnnnnnnnnnnnnnnnnnnnnnnnnnnnnnnnnnnnnnnnnnnnnnnnnnnnnnnnnnnnnnnnnnnnnnnnnnnnnnnnnnnnnnnnnnnnnnnnnnnnnnnnnnnnnnnnnnnnnnnnnnnnnnnnnnnnnnnnnnnnnnnnnnnnnnnnnnnnnnnnnnnnnnnnnnnnnnnnnnnnnnnnnnnnnnnnnnnnnnnnnnnnnnnnnnnnnnnnnnnnnnnnnnnnnnnnnnnnnnnnnnnnnnnnnnnnnnnnnnnnnnnnnnnnnnnnnnnnnnnnnnnnnnnnnnnnnnnnnnnnnnnnnnnnnnnnnnnnnnnnnnnnnnnnnnnnnnnnnnnnnnnnnnnnnnnnnnnnnnnnnnnnnnnnnnnnnnnnnnnnnnnnnnnnnnnnnnnnnnnnnnnnnnnnnnnnnnnnnnnnnnnnnnnnnnnnnnnnnnnnnnnnnnnnnnnnnnnnnnnnnnnnnnnnnnnnnnnnnnnnnnnnnnnnnnnnnnnnnnnnnnnnnnnnnnnnnnnnnnnnnnnnnnnnnnnnnnnnnnnnnnnnnnnnnnnnnnnnnnnnnnnnnnnnnnnnnnnnnnnnnnnnnnnnnnnnnnnnnnnnnnnnnnnnnnnnnnnnnnnnnnnnnnnnnnnnnnnnnnnnnnnnnnnnnnnnnnnnnnnnnnnnnnnnnnnnnnnnnnnnnnnnnnnnnnnnnnnnnnnnnnnnnnnnnnnnnnnnnnnnnnnnnnnnnnnnnnnnnnnnnnnnnnnnnnnnnatatatatatatatatattatacctaataatatattttatatatagtattttatatattatattattttttatactagatacacgtattatgatgtcatgttattttctaactcagtttctttcaaaagataaaaattacgctaaattaacaggatagattaaacaaaaagataacataatcatatccggccaatacatcaaaaaattaattacaattaaatatgatcgttattttattctatcctactttaaccaccaaattccctaacctcccaagtcccaccacaatgaagtttgcctttttcataagatcacgttctaatgtttcaaagaaagaaagaaaaaacgagacaataaaaaactaaaactacttcgttgaaagaaacaaattatacattagtaatttctataatttgaagaaattaatctctaactaaaaggatacgttcagttgttaaccccccaaccccacttcaaaaataaaaaatgtcgtgttactaatcaagaaataaatttatataagggaacgtaatgaaatagacaatgctatcagtttctttcaaaagaaaagttttgaaagaaactgacagaagagagattatggcagaaaagaaagacacctgatatatagttcataagaatggggagaaaattatttaaaatggtcaaataaaattaagttaaaagataatttagtctacctaatgtaaaagtggtccagtccttcaaatctctccaattttgagtgaacaattttaactaccttctccaaagttttggatcaaacaaataaaaaattataataatacttatcttccattcccccttctatttctcaccaacggaacactaactaaaggtcgtggagataatatttcaaagcaaagccatattatatataaaagacaatatacaactctatggctatgtccatcttcaacctcaaatacagtgtgcacaagctttgttgatatattaacaaatacttactaacaaaactatggactttcaatatctgaagaaccggttgcattaatctttgaaggcaattcacttatggcaattaaccatagcaccgaattggatcattgcagcctttagaagcagattgcttgaaaccaaatcggccacctttctcaaggtactgctgatggtactcctctgccctgtagaacttcttggcaggaaggatctcagtaacaatcttcctgttcaactgcttctcctgttgctccaatgactccttggccgccttctcttgttccggcgtgtagtagtatattccagatctgtactgtgttcccacatcattcccctgccacacaacaagatcaaatggtaactaagcgcttaagcggtagaatgtacaatccatgtatgtgctgctgcatatcataactagtcaccatattttcatgtgtgcatggatttggatggaagagtgaattcaagaaacaaaattattaagtatgcatattgaaaggggacaacaaaagaaacaagggacaagacaaaaatgtagcaaaggaaatactgaaatagattactccatatggaaacttatttttggatgctcacaagtcattctagagagccatatataattgaagtccaacataagaagttggaactagtacattaccacactgaaattaaagcaaaatcatcattgcaattaactcctaaatgcaactgataaatggagttacagaatgtacaaagaaaggagacaatccatcggatgttaagatattggatcaatgataatcataggagctggggttcattgcaggttcttttgaaaacagtgctcataagaagagatgttttaataagagagtttttgctgacaagaggaaaaaagaaataaatggatggattggatatcttacccatgaaacattattaatggatgggttgggatttttctttatcatataaagtcatggatggtttggattttttttttaataaatttctaccacatcataaatgaactaatggtttatttttgaaccatctattttaatccaacttaatttatccaaaccatctattacattacacccctataaacatcccactaagtgcaaacagaagggtaaaaacaacctaaacaactattaccaagagacccctgcaatttgatgcgacccaaaattcaacacaatatcatattaaaacagaatttacaaaacagacatgactagatatcaaaccataaatgtatctgttaaataatggctacatagagaaaaccaaaattactaatttactataaagaaatcaatcaaggaatcaaaaatcaatcaaggaatcaaaaaactgttggcaaaatgtttaactctagaagtaatgcatcattaaacaattgtacagaaaccccaaaagtaacaaaaatcatttatgctgacaatacacaaagtccagacctattattcatatcagaaaattctagaaatatcaattagaaaccagacttcctcattttttacatgataccgtgaataaccaaaaaaaaaaaaaaaaaccaaaaaaaaaaaaaaacttcatatatacctgtctattcagagtggtgggatcatgtctagcccagaacacgtcaagcagagtctcatagctacaactttttggatcatattgaatccttacaacctcggagtggtttgtggtccctgtacacacatcctcataggttggattatgcacaagcccctgggtgtaaccaacctctgtcttggtcacaccaggcaccctctggaaggccaactcaacaccccaaaaacacccagcaccaaactcagcaaactgctggcctggtgctggtatgtcatcatctggaccctgaggaatggatgaatccatgttctctggtgctcttgcgctgccaaacccgagtctgttcaacaggttcatggagggcttgttcacggcaatgcgaggacgagtttgggaaaggaagcacggacgcttgacagaaaatctagaaagtgagggcaggaacttggttttggcaggacaggagagggaagaggaagcaaacactaaaagcaaattggacgtggtggtgtagctgctgctgattgctgctaaacatttgaataacatgagagtccttttctagatgaaataatcaacttcaaaatgctcttgtatatatgaaaaaaacaaaagagccaccaaatcaggatgccaagcaactgaagttacaaatttgaacagataatcggaagtttaaaaattaattttgaatcactcatccatatggtgctacatttattactataccacatggcacttgtatattggtaaatggtaatgataaaagttttacatgaatcaaggatcatctgaactaataaaataattattctctgttttcattttgaattctcacatataattacaaaaatatcatcttatgcttactttgttccctattgtcaaggatttgtgctaggaccaaccaaaataatttgtagaacatggaaaatagtaaacaaagtaaatgtaagataagatttttatatttatttatgaaaataaaaattgaatacatatattttctgaaaccaaacacgtcctaaattttataaagataattaggtttaaaaataacttaaactcccatcccatcacatcactttatgttctagtcctaatcacatatattcctccctctaacttttggatattttttcttatagtatatgtgttttccctctaacttttggatattttttcttatagtatatgtgttttctcccccaaacatggactacaactttacaagctgcagactcacatacaactgtgcctactattgaacactaatttaacacttaaacacgccactattttttattcaaataaaacaattagccgatactctttctttcatgcatgtatgcaatcagacaggaatagagaaaaacaaatccttgttatgaaatatagaagtgatttatggtttaactattagcactcacttgggggaagaaaaagaagacaagtagtatagtataagattccaatttcatagaatttccaataaatggaaatccgtattgggtcaaagattgtgccaacaaataaaattatattttctcatgcaaacagctggcccagtgtgcatccattgctattcataaattgggaattggaacagaatcacataaaaataaaaccaaactcacaagacccagaattgggtgcataaacatgaaggaaataagtccaccaaataaattaaaggaaatccaatatcaacccatacctgctccacaaattctcatcttcaacccttcaacaaattacaggaatcaatctccacacaataataaaggtaatttttttaacactaagaagaaaaattgaactgaaataaggagaacccacaattcccttttcctcacaggttaaaaggaagagggaaatgggagaaattgaattgagaaatgagagaaaacgtgcaattggagaatgaagaacacaacaatacgtaccccaagtgactgagtgagagagtgagagagtgagagcagaagagagagaggttgctggttgaggattgagagaagatgaggatttgatcactgcaaaaagagcgacccttggacctgaacaatcatgctttatcagtttatctctctacgctggcatcaatcccgaaaatacttaaaagcccctccccaacttaccaccaccctttaaagtgtaaagggtaggacgtcatttcccaatcaaaatcacattaaaccccatcaccttcgtgttggagtttgcctggaatgtaacgactagaatattacacaaaatagtgcatctaagggtgacacgtcatgaaatatggttcatgtattattttttcacgattttagagagatgatgtataaagtaaaaaaagtgcaaatttcaaattatttactttttattaaattaaaatatctcacaatttatcaaaaaaggcatgaatcaactggccttgataatataaaatttagtgttatattttttttaatatatatgtactaaagattcttttgaaaataaaataaatcaagttaatttataaaaattgtttcatttattataaatactttttaattaatatataagttaattttaacttataaaaattgattcaatttatatttatatttttataaatatttattaaaaaatttattcaaacaaaagctttacctcttaatagggaataaatcccattagaaatgcatattctgattgatatcttccaattaacacaaactaaaaagccccttttatctagtttgtgttccttttttttcttgctgctgttttatttttcatatatgtacatagaaaaaaacacggaacttctttttagtacctttaaaaagaaaagtttgggtcactactttatgtaaacaatatcatttctagtgtgattatttctatttttatagctataggtttgttgtnnnnnnnnnnnnnnnnnnnnnnnnnnnnnnnnnnnnnnnnnnnnnnnnnnnnnnnnnnnnnnnnnnnnnnnnnnnnnnnnnnnnnnnnnnnnnnnnnnnnnnnnnnnnnnnnnnnnnnnnnnnnnnnnnnnnnnnnnnnnnnnnnnnnnnnnnnnnnnnnnnnnnnnnnnnnnnnnnnnnnnnnnnnnnnnnnnnnnnnnnnnnnnnnnnnnnnnnnnnnnnnnnnnnnnnnnnnnnnnnnnnnnnnnnnnnnnnnnnnnnnnnnnnnnnnnnnnnnnnnnnnnnnnnnnnnnnnnnnnnnnnnnnnnnnnnnnnnnnnnnnnnnnnnnnnnnnnnnnnnnnnnnnnnnnnnnnnnnnnnnnnnnnnnnnnnnnnnnnnnnnnnnnnnnnnnnnnnnnnnnnnnnnnnnnnnnnnnnnnnnnnnnnnnnnnnnnnnnnnnnnnnnnnnnnnnnnnnnnnnnnnnnnnnnnnnnnnnnnnnnnnnnnnnnnnnnnnnnnnnnnnnnnnnnnnnnnnnnnnnnnnnnnnnnnnnnnnnnnnnnnnnnnnnnnnnnnnnnnnnnnnnnnnnnnnnnnnnnnnnnnnnnnnnnnnnnnnnnnnnnnnnnnnnnnnnnnnnnnnnnnnnnnnnnnnnnnnnnnnnaaacaacttaatataatatatttattacgttgttatcagctttttacgagattttttgtgagtggtgtgattagctccttcgttttgttaatgttcttatcattttcttacgtatagttgcaacttttttacctattcaaactaacaaacaaatcaattcacagggcgtttgtttcactaattatttctttaattctgaaaatattttttcttgagaatatgacatagaaatattcttcacaagtattttaaaaaaatatattatatatctgataataattattttattacacctcataataaatatgagagtaatttttttcaatcttatattttcaaaaataaaaaataatccgtgaaataaatgcgttgtagtacataaagattatgatgcattcttcgggcaaaaggaaaaaagagattaggattcttgtttagtcttttctttagtttggattagaattggaattggtcctttacattttggttttcctaacgagggaagttcacaaaggaaagtgtacatttcttcaaggaaattgttcgtttctttttttctttacatcgagctattgtttgtttagcatttaacaacgaactaaggattaagttttgaaaattttgaaaaaatggttaaatacagtaaaataggatttcgtaatttttcaagtttttacttatctagttgaaatgtgataaagttaagtttttttcgaagtatattttatgaaggttttttttaacctctcgccttaaattttgataaacaaaaagaactaaaattggattggcttatttatttataacttttttgtgaagagatagagacgggttatgtatctaataagaaaaagagacaggggttgtaacattggtcttggactgtgccaaggccatggtacgtaaactcaagggtaatatacccagaatttttttaaaatgccaaaaatgctctcacgttatacaagcatggattcgcgaatccgtaaggtccatacggattagctcaatccgtaagtaagctttttttttttttaaaaaaaaagttaaaaaatatttttccaaataatttaaaataatagtgcatacaggttttgaacctgcaaccttcatgttattaacatgatgttccaaccaactaaactaatagatcaactatgataaaaatcaattaatgttgatacatatatcattaaatgttgtaatgtatatttaatacacatataaattaacataataaattttgtaacaattaattttgatataataattaaagtatttttttacatataaaaatcataagtttaataaaaatttacaggtttaataaactgtaaatacatatataatttttaatttaacctataaatacaaatataatttttattagacctgtaaatttttattaaacttatgatttttatttaaaactatgatttttatatgtaaaaaatactttaattattagatcaaaattaattgttacaaaatttattatgtaaacttatatgtatattaaatatacattacaacatttaatgatatatgtatcaacatgaattgatttttatcataattgacatattagctcagttggttgaaacatcatgttaataacgtgaaggttgtaagttcgaaacctgcatgcgccattattttaaattatttggaaaaatattttttaacttaaaaaaaaaaaagcttacttacagattgggccaatctgtatggaccatacggatatgactaaaaaaaaaaatctcacgaattcacgaatccgtggttgtataacgtgaggacatttttgatattttaaaaaaattctgggtgtattagtctttatactggtgtataaagttttacctaaagttttaccctaaactcaatcgtgtcgtgggcttattgtcttccaccagccgaccgtaaaatactctgggcttataagttcggctcagaattaagcccattagggtaagaaataagtgtagcctcaacctcaatggtctggtctgaagtgaactgaattataaaaaaaaaaactcactgaactgattcaactcaaccgaataaaaaaaaggaattgagtctacactctacatattaagtaatgtctctccaagaataaaggataaaaaaaggaggtctttaattagtaggtgtcggcaaacaattttttaaaacattttgtggtcttattttttatagaaaaagataggggtccacttaatgatatagagtcaaaagatgatcacttgataactgcaacatagcgattacactatgtagtagatagccactcaattctgtctttgtatgtatatatctttgaagaatattacaacattcattttatattgaatttttgtcctatataacgggcattgccagtaatttttattttatctttttatatcaagcaatttcccaatgcaatttgtatgcatgtgtttaattcaaattttatttttatttttatttaaaattgactttaaacttaatgttcaaaatgaaaactttgaaattaaaataaaaattatttcacatcttttatttcttttaatttaaaagaaatgataaaacaaaaaggagaagatagagtaagagaaaatgtaaaaagtgactcaaaattgttctttttttgtattgaaaatctacttttttccgaacatgattcttcagcacacattgattagtacattcagtttaatatgaatatatagaatggagatttttttttttgggttctttaacccggccagttattcttgaaacaatcttcttgtgttgaattaattgggactcccaagtcctgtttatacaagagtaactaacattaatatgcaatgatgtaagttttggagtctcttaaccatttatggtctgactaaaagtttagatatggaccagagtagtttttttactctatataatttatattactgcttagaaaagaaaaagaaaaaacaggtaatcaacattaatatgaatgtaatagattgactgtagtgtaaatttactgatctataaacaaaagtatctggctacaaattagtcctaaaaaactatatttacaaattaataatattaactannnnnnnnnnnnnnnnnnnnnnnnnnnnnnnnnnnnnnnnnnnnnnnnnnnnnnnnnnnnnnnnnnnnnnnnnnnnnnnnnnnnnnnnnnnnnnnnnnnnnnnnnnnnnnnnnnnnnnnnnnnnnnnnnnnnnnnnnnnnnnnnnnnnnnnnnnnnnnnnnnnnnnnnnnnnnnnnnnnnnnnnnnnnnnnnnnnnnnnnnnnnnnnnnnnnnnnnnnnnnnnnnnnnnnnnnnnnnnnnnnnnnnnnnnnnnnnnnnnnnnnnnnnnnnnnnnnnnnnnnnnnnnnnnnnnctatatatttattattgtctcatttaaaaaaacaaaaatgtaaagctcatcaacaacaaacataaaaaatcaacgggcgttagtatatatgtaatatttcccaataatattttgtctatcacttaatattaaaaacctttgacaacatttaaaaaatatagttaaattataaataaatattactaatatatttttgtgacattttatccaatgttattaggtataacccatgttgttaaagtctaaaaatgttaaaaaagactttaacaattttgatataatgtgaaaaatattttaataatatttatttatgatttgacgataatttttaatgttactaaagatttgtagtaatgtttttattaataatgtttgataaaaaaaatgtcaatggaggctacatatgcagtagttgacatgttctgcagtccaacatgtatgacactcactcagatgtgacttatttaacttttataattcatattttcttatatgccatgcttaaaacataacgccgtttattactttgattattcaactttgatacacctaaacgtggaaagcagaaaattccaactacaacctattgtgcttttacaagtcctaattaattaaggccgttattgaaatagagtagtacatttgacgcagtagttgtaaaacgagcaatcaacatcagctacacgcggtgatttttaattaataatatttaaggaaaattaggtagctactagaaaccaattgttttcctttgattagttaattaccaacacaggtacacaactacatgcacaagtcttgggcaaaatactatgatattcatttaaaatttaaccctacaatgttgtcaaatgaaagccaagtaaaaacattaatattttagctagagtctgcagctaactgctgcttaattaagacttagaagtcaaacaaagggaagatagtagtcaacaatcgccaagctaaaagtcatatttgaattgaccatataatatataacaacaatgaaatggcccagaaaagaaattaagccattgggagattaagattgtaacaccccttacatgcaccgggtaattaccatgcttacacatacatcagagattagcagtttggaaacaatataacaaaggcatcatcaaatgccgtaaacatacatgcgtttacattataatatggtgtttatacataagtttatgtaccattacaaaactgtacataaaattttcctcatggtacatcaaaaccaaaccaaaggctaatacaaaatatctgagccagatgctcatgtcatctagcctaagatgtatgaacagtgctatccctgcataggcttcttgccttgggatctgtccgctcctactgaggattcacctgcaaaacataagccccacacaagaggtgagatataaaatctcagtaaactcagggcccttgaaggtatttccttcccctggttcactttcaggcacatacatagaaatagtacattatcatcaatcacagaacatttctcattcatcatgagaacacacagggtctaatcccctttcacacataccatttctatggtttcaccccaacccgtctacaaacaggtggtacacagcacattaccaggcagaggctacatctagatatataggaacatctccactcacagaggctacatctatatactaggaacatctcttgcccggacaacaacatatctattggaggcttcatctgaaacataggaacatctcagttaagaggctacgtctatgtaacaggcacatctccatctagtgaggctacatctgtgtataggaacatctccattcaggaggctacatctatatcacaggaacatctcacatcctataccaaccaattgcctgaggaggctacatttgtagatataggaacatctccattcgggaggctacatctatatcacaggaacatctcacatcaggtcttactcaatctctcgtaatctatcctactaccataggattcacaattcaatctcataattaaacaggcatatcaacatacaatttctatatacatgcaaatgcccacaatagaaccatcaccccaaacttggtgcatggtggaacacaacaaagggcatacaatcaaggatcaagagcttacctgctctgagcaaaacaccggctctcccggcctcactatcaccaccaccgaaactctcggtctcacgttctacatcacatcaaatacagcatatcaatgacggtcacaagccgttttaaacgaaaggagttgtaatccttccataggatacataactaatcacttcacaaatgattcacagcctaaccacggctccagagcctcttctaagactccgctcatgctaatacaagcataacccagaaccaaaatcaaacttcatcaataatgatttctgaaggctctaacatcatcacaacaaccccttgaacataatcttctacagaacccagagctaactctagccctatcacaaaagggttactattcatgcgaatccccaatttcacaaattaatcggtaaaacttaactttcttacctcaagacagtcgtggagggctagagaatcacttctctaggcttcaacgtccgtgaatcacttccttccccttcaaaatccaagattttgtaaaaatcactgtagcacagtaggaggaacgacggtttcggcaaaatttcctgcagcctcgcatatatatagactgctacagtaactgctacagtaatatgctacagtaatatgctacagtaaccccatccgtgctgctacagtaactcaatccgtgctgctacagtaacccaatccgttatgctacagtaacatgctacagtaattgctaacgatacccagcaattactaactacacccatgcctccagcaatgaccaaactgccctttcgtaaattcgtttaattacgtaaatatttcccaaaattccttacttaaatttagtgatattacaaagatagccatggcgcccaacatttgcatgcacacataaagtcatgagtggctgcacgtatttcatgggtgcagcacgtgatccagcattcgcgtttgtgcaagaatgattcaaggttttgatttttagaaatttacttatattttggataaagtttcttagaaatttataattttttaaaatgtatagtttttttttcaatcattatttagtgattaaacatgtcaaactctaaaatatcaacatatataaatgcatgttacattatcaataattagagatagagatatatacttattacaattcgaaatcgtgctatgcaaatttgctttaactttaactatctaaaagccaaaaggttgactacaagctaacattcgcttttattcatattcaataagaggatagcacgtttgaaatggcaacgaaaagaatcttgggacacaacaacctagtttcatatttgttcttccccagctcaaggcaaaaactctgtaaggtggattttggaaatctatatgattttcttcgtactagtccagtttccatggagcatttgcaatgattttgacgattaagttagtatttgcaatcgtagataaagtgtgtaaatttatagagataattgtttacttgggactggaacatgttcttaggtttacttctaaaattattattgagttaggatggtgtctcttgcatgataacgcatgttaagtgtctttaaggttaatcccttgatttgcagtaaggtattaataaattgtgttcatcatctcgtgcttttgtatttgcatgaattttatatgcgtaagaatatgatcgttgaatgagaggggcattgggctatgataaggccgatgagtattagtaaaattaatttcaaatcatattaattttaattaaaatattaagtttttttttttatattataaatgcaagttagtagtgaaacttagtataaaagttatctactcaaaatcaattcatcaaaagtaaaattaaatatatatatatatatatatatatatatatatatataaatttacatgaaatcacgttaactgctattgagcataattttaaaacatcccaagtgaaactaaacaaatactatatcattcaaaatctttaaacacattaaaaactcaatacatagatatacatatttttttcaaccatcgcactggcctattaaaaaattgagtttaatatattcttagtttttgcaaatataataagttttaatttaattctttaaaaacataactataactcctataatttttaattttttttaaaataatccctatctcttttttctttttttaaaaaaaggaagaagtaattacggtgttatgtaacgcatcgttgtagtccttctggcttctgatatatataacgcatcaagaatgtccttgagattgagaataggtctgagaggaacagaggaggtaaaaccgatcgattttgacagtgtgtatggaatccaaataaaaaataactctatataactaataattatggatttgactatgtcgttgtttaaatgaaaagcgttctttaacgatcgttgtttattattgatcatttttccacaagagtcgtgtagggagtatatataagctacatatataattagggttatgataatgaaaaaagtgtgtttgggtcagccaaatagaaattgcacgtgaaaggaaggtagccaaacagcaccttcactcaaagattccgttccctaatttgtgttcacacctgacgtggctacttctatttgaaacttgtcctcagattccaggtttacccttttcacacctaaaacctaccaactaattcagcttttattatcactttatgatcccaccatatattttgatgaagctatgtgtttttaagaacacatttgatcaaaatcatggaatatgaaagtttaaccgcatacttaaatagctataatttatttgtataaaaaagacaactaggtttgtctcataacataaaaaggtattttccaataaatttatagtagcatctaatttcatataaagttataacacgagcttcttgatcatttgtcacaatttgaagggaaatgaaaatgagatttgtatcctgagtttaattatataataactatttttctacatactatacaaggagaaaaaaattatttggcaacaatttatcgttgttggaaatgcccagtttcgtttttgtctatttggaaatgcctttttaagtaattaaaaataatgaaaagaatatagataattcatttaaaaaagtttacgatagattcctaccatgcccatgttcacacctgaaacaatattgaattgaacatttcattgctggctgcatgaccaaaataataataatttaattggtgaactttgagggcttgacttgtgcttcgcggctgttcatggcttgcatgccactagcttgcttaaagatacacaatttataaacttaaatacaattctgtaattatttttaataaattattttatttcggaaatttaaataataaatatgttcatcaaaaactaatataaattactgaaataaacctttaattttaattaaaaatatttatgaaattgtatctaaatttcgtcttatcagtatttatgcttcaatatattgttctacaatttttgactcattgtttttttcagaaaatatctggtaattttactgtatatgcacccaaaaaagtcgcactacttggtacttgcttttcaggtataaaataatatattgaatagaaccttgagaagaaatcattgaatatattttttatctaaaccataaatatcttttattatagacaacaatgcttgagttagaaaaaatccttaattatagtaaagtgaaataaataacgtaattcatatcataaggtaatatttttatacttttcctttaataatagtgggcttgcttttttttattagaacacaactattttatacaaaatataatttcactcgagttaaatttaatattattgtgatttgaatgattttttactggggcaaaatttaattgatgacaaaattatttgtctaaagattaaactcaattatatatttaaatttaaactcgaaatgatctattaaattaaaaccatcctggctaataaaaatagtgttataaaagtcctatgaaagttaacctacgtccgtgagttactgtggatcagctggtttttgagtacgattcttttagataaataaattaaaaaaaaaaacattattggttcattcccattatttataaaacatatttgttgggatggcaaaaacaagtagagccgcgccagtcgaagtctaagcgtcggctcgaatgtgatcccgtaacgtaagacacctttaacttgaagtccgttagagtcaaaggggcccacacttgccacctaggaaaacctacgtggcactacttaggtttgacctttcccattttctcatttaattttttcattacctatctctctctatatattggtaatatcatatcacccacttagctattactttccatcattgcaattcgcaaagccacacaaaacaaaatgggcaattgcttgaggcgcgaatcgcggattggatactccaccgacgatgacgaggacgaggactgggaggattttccggcggcggagagcggcggtgttaagaaaaggaggagagaggtgaagataaagataacgaagaagcagttggaggagttggttggcaaagtggaggtgaaggagttgagaatggaacaggttttggcgcacttgatgatcaatcactctcttcaacgtccatggaggcctgctcttcaaagcattccagaagatcattaacgtaattaattagatattggagcagtgtattgggcctattaattggctcaatccttccatcataaactagggttttgtttttgttctgtgcttctaggggaatgttaatattgtaaccagggtgggtggttggatgggtgcttacactttttttctttcttttgtaaatacaaaactttagtacccttttgatgctataccctacatatatcactattagaggttgatttatctttatctattatcttctttttacttttctcgtccttctcatatttctatttatattactaaagtgatacaaaattatttcatctagtttattaatttttgagaaatagacttttgctatctgaatattggtggttttacttaattagatcatgctttgactttaatgaaagatatatgtgaattataaaaataatttcaattaaattgtttaattgtttgtttgtctttctaatatgtgttactttcaagagataataatccacaataaaacaatatatttttctaataagaattcgaattttgatttacttattgtgaagaatgattcttttgctagaccgaactccattggtatgttctgttcatgactgtatatagggatataaatttttgtgtggggttgagaaatgtgatgagattctgtaacatgtttttctatctgctccaccatacatattgtgtccagggtggccaccactttcattcttcaacttgagtggcgagtggcgtgaatgaatggttgtgagattcgctttcacaatttgttattagttttttagtctctataatagcagcattgaagttgacgagaaaaggagagttgttttttttaaggcttggtaagatcttcgaaaaggatgaaaaaatcacaaatattttttttatatttctgattgatggctaatcgacttggactatgtttaccatttttttctcctaaaagctgactcattatttttttacatattgtatgaagtaacgttaaacggtggattaattagggcccgcgagtaatttttattaaaacaaaaatggatatttttttcaacaaacaatgggaagctatcactttcaagatacgttgcctaatattacccacatatggttcatctttgaattagtaaaacattatgacaatggatggcagtgctgtgaatagtacatgtatgggaattaaaacatggtagattaattgaatggggtgaagagaagcagtgcattggcaattttgaaatgagttgcactattaatttatcatacatgtcccacatgatggaaaaaaagattgatttggaaattggatctgaaagttggaccaagtacaagtcatggacccaacaccatgagattaaactgtgcaaatgctctagcctacaactaaggtttgtatcctttaatgctaagcttggagtagtaggtatgatgcctattcagcattacacactttctatatatttttctaaaatatggtgtaaaaccttccaaaattcctagggcaactaaatctctttgtcgtcactatcgaaatttggtggttgatcaatcatgaattaatgagagctttgtggatagaataacatctcaagttttgagttcacactgctcctatttcctaagtcctaccacaaatgtttgtattctagtctgccggcagtacttccaagtccaaacccaaaatattataacaacaaattactattcctcaattttaacataagtatcattttaagattatgtacaaaaatttaaaagtaattaaacactctttaattttaaaaataatttactcggattatattaccttttcattttataatattgtcttattttgcttaattaatagtatataaaaactacatatgatttaaagtattttttttaaaatgaattatttgctctctttttttaaagaatgacgaatgatttaaaataatttaaaactttgtgttggttatttgatataaaaagctccaaatgtcatatctgaaaaaattttaacaaaaaaatctacactgcaaagatacttttatccaattcagtcaagttnnnnnnnnnnnnnnnnnnnnnnnnnnnnnnnnnnnnnnnnnnnnnnnnnnnnnnnnnnnnnnnnnnnnnnnnnnnnnnnnnnnnnnnnnnnnnnnnnnnnnnnnnnnnnnnnnnnnnnnnnnnnnnnnnnnnnnnnnnnnnnnnnnnnnnnnnnnnnnnnnnnnnnnnnnnnnnnnnnnnnnnnnnnnnnnnnnnnnnnnnnnnnnnnnnnnnnnnnnnnnnnnnnnnnnnnnnnnnnnnnnnnnnnnnnnnnnnnnnnnnnnnnnnnnnnnnnnnnnnnnnnnnnnnnnnnnnnnnnnnnnnnnnnnnnnnnnnnnnnnnnnnnnnnnnnnnnnnnnnnnnnnnnnnnnnnnnnnnnnnnnnnnnnnnnnnnnnnnnnnnnnnnnnnnnnnnnnnnnnnnnnnnnnnnnnnnnnnnnnnnnnnnnnnnnnnnnnnnnnnnnnnnnnnnnnnnnnnnnnnnnnnnnnnnnnnnnnnnnnnnntttgtttaaatttatgtcacatgttcaataaaaatgattttttaaggtgactatggcattttggtgtaacgataaaaatgtgattgaattaattttagtaattttattttataataaaatatcaaaaagatttatcctccctctcacgagtatcgctaaataacttctgcagaagtacttatatggctatatttgaataatgcttttatatacgttcactatagtaattttcgattacaactattgacaattaataaattttgtattgaaacttattggatgtttatttatttaatgataaataatataccgatcaaaagaaattccataaggtattaaatatttttttgtagtgcaatatattttttcattggttcgtatgacgttcatatgccatatagattgcctcatcatctttaaaagaacaccctgtatacgcacacgcacacaatacgtcacccactcgatctcaatgcttacaagatgaaaatctttctattggtaagtggtaacactaacaactacaatgatattagtatagtattgtaaacgagtaatgttcacttgacatgatataccatatcaatatcaccatcttgtaattgcttttcaaaataaaattgacttcccatcatcgtcacccatgaatattatattgatatatgttgcatttatcttcttgtattataaacgactgataggagtatatattcactgcaatttgcgaatggattatatcattattttattacaagaaaaatatcgacagatgtgtgtatataattaaaaaaaaattcaaaattgaaacgtggttaaaaatttaaagtaataacactgacacaatgtgataatgannnnnnnnnntgtgtgggaaaagagtaaagagaaaaagtcatgatgggatttcaaggattaagtggtgctattgaaaggagaaaaccaaagttttcatcagagttatggaggaagaatgttaggaaacacaaggaaatgcaaatgatatgtgagcgaagatgggataaagggttggaaaaatagctaaaagacacttgaagaatcaagaggttggggacctgaggataaaacatcttggtgatgatggaatgtaagtgtataagataaagttaagattaaaatgaattgttttaaagcatgattcttgtgttagaatgctgaaaactagaaaatgtgtgatagttaagaaaagtaccaaaaaggaactgaagcaagaactaaaagcttttattcgattatgccaagccttagggatcaaaagtggagctagagctgctacactctacaggcttgctaaaattagagagaaaaagtcaagagatttggataaaaaaagaagtgcattaaggatgaagacaataaaatctttgtttttgttatggaacaaaagtacaagacacgatagaaagacagaaaaattacttttagaagttatttaattaagtacgtaaatttctatcaggttaaacacaagggacgaggaccaaaattatgccgtttattgtaagatttgggagaaaggtatcagttggcacatttctataaaaaaaaaaaaaaaataggttatgagtatgaggcccaagaaaatgccagaagagtgaagcagtgatactctaacaccaaattgttagaatattgatatgaaaaagattatgcaaattattggcgataaagatgaagttatgagaaaaaggttattgagggaagattaagaaaaaagactcatattactaaaacaatttagatttatgcctaggaggtaaactatggaagcaatataattgctatagcatttaatgaggagatatcgttggaataaaaatgattttcatatgttctttattgagttagaaaagacatatgatcaaatactaagaaagatattgtggagggccataaagaagaaagaaatttgtgttgcacatcttcaaacaatcaatgatatatatgaggaagtcaagactagggtgagaacacaattacacagtggaatcacaacaaaatttcttataaccataggattgggccaagggttaattttgagctcttatctctaccttagtcttaaatgtccttataaagtgtatccgaaagtcaatacaataatatatgctttttacatatgtagttctgttggaaaatccatagatgacataaatgaaaaattgagtatcttagatattcttttcttatataaataaaatgaactcacaacttaatttttcactgtttttattaataacaatacctattttctcccaacataaatcaacatttgaaattcatgattaacaataagcttgacggctagaacaagtatttgtaaatttgtttcgagagtcgttatatactatcgttaaaagggatatttatatatagtatcaaaagcattcaacactggccaaggttaaaatagtggcgttttatgtagttattggactaaaaattataaaaggaaaataagtgaaatacattaggtaaaaatctttaccaggaagagaatataaaaataaaaataaaaaatgactactaattagtttcttgatctagtctgccactagaggtgagtttcttataatcagtcattatggaacgaaatcaaggaactaatattacaacccaagttgccacaacaattctcatgcagaaattattcagttttattgctgcaacaaagcaactacctttcatcaatgatgttcattcaaatccacggagattacacatgaacttggtatctcattcaaatcaacagagagcatcatctatactcttggaagttaacatgaccagttgcttgtgcatgctccactgcctcctgaaatgttcacaaaaaaaaaaaaaaagtactcagaatcattagaacaaaggagaataagctaaggtgggtaaatagaataaagcaaagcatcaggtactgagggatcaccttctgaccaattactccaatttggcatactccacagcgcagagtgaagttagaagtgtccgtgtaactccgtttcctgagaaagtgtagccatgatatattagcatcatgggcatagcataaataaataatgatactaagtagcagaaataattgggagaggccattcgagatgataaaaaaaaaaaactacgtaccccattgccctaaggctccacgctatgcgcagatagatgatatcgaaattaaattgagaagattaaaaaaaattacatcatgcaagataaaacaaactgacttccctttgtattattgcagagttaaaatatacgttcctactggcacacaagatacatagcccaactatctctttcacttaaaaaatgtgcataatttcacctgtattgtttgacaatagaaattggcaaagttgaagttttcaacttatcagtctatgtatatatattaacagctttgcggcacattcaccatgttcttgttctaaattgataaaaggtgcactggatttgcaaaaatgtcttcttctgtttgcaccaacaattacaaaaatgtcattagtttcactttattttttgtttttaaatatttgcacataaaaacatgaattgaggtgaattttgtaattgttactgaaaacagaaaatatttccacaatccaattccaaattcaaatgcatcccaactcctctgaaagtgaaaccttaaaatacatgcccaaaaagaagaccttttaggtaccaatattcacaacaaatctgatatataaagaatccaaatatgaagatttatgtaattcaattatctaaatatgataatatttatctctttcttttaagaaggttcaataagaatagcgaactacctctgctggtccttcacaaaatttagaacaagcccttcaacaggtccaatgcttctgtttttctgtacagcaaatatggtctgatcaaactcctcaggagcttcctcaaagggagacatctgacccatacaaggggtgtgagtaatcatcaggcaacatgaaaacaaaaatacatatgaaccttaactttttaattttttttattgtttcatgtgtagtagataaatatagataccatatacttgtaatctcacaattcacctccaaaaccacaaaaaaaaatgcacagaagagaaggaatggatcaacatcaacatcaacaatacctttaacccaagctaattggggtcggtgaagagaaggaatggatgataaaaaaaaaaaaatccagtatacgaaattacttaccactaatgcatcatagtggagaccatcataaatcagcatcactctttcagaataattcctttcctgtaaaaagtattcacaaaaagtgaaaatagaaaagttcagtcataagaggttgcaaaacttgagagcatatagattgcataagagtgactaacctgaccgtacaaatcacatcgagttgtctggatatcatatgctgcaatttcacgtccataataatctgctaatattgaaagttcaattgcaccttcacaaagaaaaatagagcttaattagcacatcaaactaacaaaaagttaacagtgctttattgttaaatttgctagtaggagtttgaaataccctttgaaacccatgtcaaattcatcaactacaaaatctatacccaccaaatttatatcaaaagcctaattttagaaacaaaactgaaatttaaacaattgtcacagaagattctctgggtatccagatgtttaaataaaatttcccaaattttaattaaatctttatgcctctctgcgtttcaggaaaataatatattttactcatatatactccataatatatttatcttagcaaagtttattaaaagctcagatgttaaatcaacctatctttgagtgagtttcatcaccttcaaagttccaaataaaaatgaattttccacacttgaggttacacattcatacactcaccacagtaacaccaaaagtagcagttccaatttgtagagtgaaaattggtaactatttccatctacctttttatttaaaatagccttgattacgaaaaacataggtcaactaacctccccacttctccgagtcaagaatccagttacaatactctgtgtttggcttcccaagaaatgcttcacaatatttctgtggatcacttgctactgttgctgctataacctttagcatgtcaaatgacaaatagcacacaaatattaagtcaaaatatgtaagaaataatgaaataacatactcaaaatgcaaagatattaggcaatacaatggtataaaagttccacttgactggtaattcttaaatgataagcgtcatggcgtggcggattttttgccaaccaccataggcaattcgtgaagagaggcccactgtggcgtgtttacatggaggaattttacccttccgccatgttctaccaaccgccattgataacactactacgatatgtttcactagtccaaatcttgagtttattgtgtttgatacctcaagtttgaaaaatgatatttttctagtagaaaagatcatatatttaactttgaaatttttgttaaaatgtaggggctaaaaacatattaatctctatattttgtgggattaaaactgaatctcgatatattttgagggaccaaaaacatgttttactccaaaaataaaaacatatcttgaggcaaaagttgaccagccagaaatgaagcaccccttggcactagaagcaaattcacaaataaactgaatacaagaaaaaaaattacctgtctcaactcagcagctttctttttgtcatgatccataacatatctgaaacaattaaacaaaaccaaaaggaaggagaaagaacatcacaagtggaataatttgtacaagtagcagtaattccaaaaaaaaaagggcctgtgttccattgcttagcttacccaacagcattgaaaaggcaactgttatccgaaggaatgacccttctcagaataacaccttccatgatgcagattgtagatgacttaccaacctaaaaatcaatcacagaagaaccatattcaaaatctaaaacacaataactaaagcaacaccgcatgtgtattctgaaaagaaagggaagaaagagaaaagggtttgaattggaaaatggagatctatgctatgagaattgaaaaagggattggtctgagaagaaggagagaatgaatacgaaccaagcttgttaggtgtgttggatttggtattggtatttgaataagaaacgttttcctttcctttttatgcgtcaaaagaattaacattaacttaacgggattgctaccgttttcgttcagatgccaccgtcattttcttcgccatgccccactactctcttccatgcccaacacctagcattcgcaacatcttccctattttattctctgttatccaaaactattatttttctaaacaattttattgctatattcaccatttttttctcatgattattttctcccgtctggggaaaattgtcatgtttagtggtcccaaatataattaatttcacattatttaattgattcttgatatttaattttaataaaaagtattttagaaagaaaaaagtaaaatcgctgcaattgtttgtaactaatttttaattatcgataatcaattattttttaatatatttaagatagggggaataatctttattgaaaaaactgacttgcttagttatagtaatataccccgtaaaaaaaagatatagtaatatctcttcttccgatcaaatatgatattttcattcacaacatttattatatttgtaacttaaatgaatatacaaattttgcaaagtattttaaataaaagtaattttcatgtaaataattgaaagaaagataaaaaaaaattaaaattattaaatatgtggatcaaactgatgtgagattatttcaatttaattaaaggttttggattcaaatattgagcattggatagaatatgattatctctaaaggagaataattgtgattaaaaaaaagaactaaaagaaagttatctcaaataatttatttttgcataaataataaataatgactcaaagatgaagaaaatttaattccaaagtttacaatcaaatcctaagaatttatattaataataaaataattaattgaatatttagagtaagattatattaagaatttatattaatttacaatcaaatcctaagaatttatattaattgaattaaaagaaagttatctcaaataattaatttatcaannnnnnnnnnnnnnnnnnnnnnnnnnnnnnnnnnnnnnnnnnnnnnnnnnnnnnnnnnnnnnnnnnnnnnnnnnnnnnnnnnnnnnnnnnnnnnnnnnnnnnnnnnnnnnnnnnnnnnnnnnnnnnnnnnnnnnnnnnnnnnnnnnnnnnnnnnnnnnnnnnnnnnnnnnnnnnnnnnnnnnnnnnnnnnnnnnnnnnnnnnnnnnnnnnnnnnnnnnnnnnnnnnnnnnnnnnnnnnnnnnnnnnnnnnnnnnnnnnnnnnnnnnnnnnnnnnnnnnnnnnnnnnnnnnnnnnnnnnnnnnnnnnnnnnnnnnnnnnnnnnnnnnnnnnnnnnnnnnnnnnnnnnnnnnnnnnnnnnnnnnnnnnnnnnnnnnnnnnnnnnnnnnnnnnnnnnnnnnnnnnnnnnnnnnnnnnnnnnnnnnnnnnnnnnnnnnnnnnnnnnnnnnnnnnnnnnnnnnnnnnnnnnnnnnnnnnnnnnnnnnnnnnnnnnnnnnnnnnnnnnnnnnnnnnnnnnnnnnnnnnnnnnnnnnnnnnnnnnnnnnnnnnnnnnnnnnnnnnnnnnnnnnnnnnnnnnnnnnnnnnnnnnnnnnnnnnnnnnnnnnnnnnnnnnnnnnnnnnnnnnnnnnnnnnnnnnnnnnnnnnnnnnnnnnnnnnnnnnnnnnnnnnnnnnnnnnnnnnnnnnnnnnnnnnnnnnnnnnnnnnnnnnnnnnnnnnnnnnnnnnnnnnnnnnnnnnnnnnnnnnnnnnnnnnnnnnnnnnnnnnnnnnnnnnnnnnnnnnnnnnnnnnnnnnnnnnnnnnnnnnnnnnnnnnnnnnnnnnnnnnnnnnnnnnnnnnnnnnnnnnnnnnnnnnnnnnnnnnnnnnnnnnnnnnnnnnnnnnnnnnnnnnnnnnnnnnnnnnnnnnnnnnnnnnnnnnnnnnnnnnnnnnnnnnnnnnnnnnnnnnnnnnnnnnnnnnnnnnnnnnnnnnnnnnnnnnnnnnnnnnnnnnnnnnnnnnnnnnnnnnnnnnnnnnnnnnnnnnnnnnnnnnnnnnnnnnnnnnnnnnnnnnnnnnnnnnnnnnnnnnnnnnnnnnnnnnnnnnnnnnnnnnnnnnnnnnnnnnnnnnnnnnnnnnnnnnnnnnnnnnnnnnnnnnnnnnnnnnnnnnnnnnnnnnnnnnnnnnnnnnnnnnnnnnnnnnnnnnnnnnnnnnnnnnnnnnnnnnnnnnnnnnnnnnnnnnagattgaattggaaaaacaagttactaacggatactaatcaaggatcaggatcttctagagtataccttctcattttagggagagaagtgggtttatctctgtcgtttaattaataaacaatctttactaaatgtatattggttactttttctgttacttatatttatgaattggtcaatccatttcagtgacttatatagtacctcaaaaggaattcatatctaaccatcagccaaatgatatctttagttaaagaacaaaatatgaagaaaaagaagataatcagtacgtactataaggttttcaatgtaacgtccacaaatcaatctaaagaaaatagatgtgagttcgagtaaaagatatttattaaaaatgatcttattcatggtctgtcttatgtaatacgatgtcacagaagctgcaaacaagaaaaatccaatgactaagtttatttcactttaaataggtgcataatctttgagagagaatccgaagattagagacctcgctaggatggtaaatgtaatcacaagagcaccattatccaaagaacaaaactaagtaaaacttcaatactaagatatgtcccttcctgcattattaacctgagtttgctgatggagccagatgtactagtacaattgatgcttatagagttgctatgcactcaatttcaatcttggcatccaatggcaatgcggctacttgataagttgaacgagcagggaaaggtgaagggaagtctgaaatcattggaaaagtaggtaaattaaaattatttaagtaactgtaggcattagtgaaaattaaataataccaacccaaagggaaaaccttaatattttcagcatggtactagtggactctctagtatcaatctagaaatcacccttagtatatattaaatatgacaagttgacaacataacctattacctattatgacaagctaacaggtgaatcttcaagactaaaccataaaaaagcatgaaggttttgaatctaaaagctggtcagtggtcagccatggtacatgtatgttacctacaggctaacacattctcagcccacaaatgcagcaggatcaatttttacagcacagtacaaattattatcagaagtgaaattctttagtaattagcacagttaagcagtttgtcaatacaggactttcatgatctgcaatatgaaatcgattcacacctaaacaagttagtgcaagcttcgccttctacaagaatgtaactgtcaaggaaacattaaaaattaaaatcactaccacagaactcacatttagcatagatctcattaactttcttgaagtccttcaagtcagccaacctgcaggaaataaaaactcaaaaactagtaatcttgctgaaacgccataaaccccaaccacaaatgagtgaggaattcatacataattgtcgtcttaacgaccgacgagtagctagcaccaccggctttaagaatttcccccatgtttttaagaagctacaaagggtaattatatcaaatgtcagcaacaaaatcaacaagtgcattgcaacatcaataaaatgttaccatcatacaatacaacaattgacattcaaagaatgtaatatcacaagataaaatgttgtctcattctgtacctgttcagtttggtcttcaacatcatcagatacgaacttcccgctctgcattgaagagcaaaacacacatcaacaatctgaagaaacgaacatcataaattaaaggaagtgataacaattaactgaattaaaaaaacctcgggaacaaggccaagaacaccagacacaaaaagaaggttgttggatttgattgcttgagaatatggtcccagagccgcaggtgccccttcggtttgaacactttccttaatacctacaaacaataaggttcaccattataataaaaaagtaaaagtttaaaatttgaaggtttcttcataatgggtacttacgagtttcggaagaaatgctcaagcatgtgaatggcaaagagtgcttcggtgacgaagaggagggccagaaggaggtgccgaccaccgacaaacaccctactccggcggccaatgaagcacggttgagcagtgcgcggccttccatcgccggaatctggaagctccgagcaccgcaccacgacgccatttctatatctctgactgactctaccttacactctcactctgtcaaagtcttcaaccttggactttgtttttggggtctttgctgcaatagtcacttctttttaccaaaactacccttatctcaggcactcatttaccattttggtcccttaaaatggatgggctccaagggttcatgggctgggcccatccttcatcctaataacagttttggttgggcccatgttatttacatacatcttttctctaagttcgcaccttttttttttttgttttcaaaaagactataggcaattgttaaacatatctcccataaatattagatatacctcttttttttttattaaatttacttaaatatccacatctcttatctctcaatcctttctccttcaagcctttctattttataatacataattgagaaaggtttaaaaaaaaggaatgtgaagtaaggtgaagatatttaataaatttaataacaaaaaataaaacaatgttgtacataatgttgagtcatgcaataatttatatatatggtttggattaataaaacagttgtgtgtgaaactgaatcaaagcatacagagaaaaggatgagtagcataatcattgttgtggaccaaaaaatgaaggagaaggaaagatatatggaatcagtcaaccatgacatgaaaaataaagaaaaaagacatgaaacctttgatttagctaaattggtcttcatattaaaatttgactctgaatctgatgatgacaaggatgatgagccatattcaccaaatcaagaccagaaagagacccaattacaaaacaattaagaaaatgaaatcatcaactatccaagttaatggcattagcttcttgagtgttctgtagttaggtttattcttaatcttggtttgacaacatgactcatcatacttgtcattatcttattcagagtcaaattctaatttgaagaccaatttagctaaatcaaaggattcttatctttttcctttgttttttatgtcatggttggctgattcaatatggctttccttctccttcctttttggtccaaagcaatgattttgccactcatcctcctcttcgtatgctcttattcattttcatacacaattattttattaatccaaaccatatatataaactaagacataacttaacactatatatggcattatcatacaatgtatatctagcattagatttaaaagacatgtttttttagctttatttacatatgtaatttaaatatcaatatttattcttttatcctcatataaaaatcttttcactaaatacgctcttagattacacacatagttacactactacatctcccttattatgtcggttatttggggttttctatatcgctagtatgaatcagccaatgtaaaatgttagaatttttcaaattaattatcttagaatggatgtaatttttttttacataatttctaaatagaatcgatgtaatacgtgccaatttccaaaacaaaaatctctcacaccagaaatctaaaccaaagcacaaaacaaacaacaactcttaaaaaaagtcccaaattgaatcaacacaaaaaacctattgaagccaaaacacaacaaaaatcaatcaatcagtcaaaaataatatattacttaaatgaaaaagacaagacatggaaaaaagggaaattcatagtacacaattgagtatcaaaatagtgttacctccatggagaattgcacgatgaaattgccaaatctatgtgtgatggaagggaaccctagtgggtgcatggaagatggagtgagggagagacaagtctagatccactctaccactaaggtatcgaccatcgttcggaataattgttccatctcgtgttgcaacaatcactcaatcaatagaaaaacaaacaatgctccaaaaaaatactaattaaatcaacacaaaaggatttgttgaagccaaaacacaacaaaagtcaaacaattaccgtgtggaacaaaaaatggaaattttgtacacaattaagttatcaaaatgatgttacctccattgagaattacgtgacaaagttgcaaaatcaagatgtgatggaaggaaaccctagcaagtgtgaaggagaggcatcctgagatccacacctccatcaaggcaccaactactgcccataactgtcattccattttatgtcacaacatgcataagatcaatgcaaaaacaaacaattctccaaaaatcccaatcaaatcaacacaaaaaagtatccgccaaagtaaaaacacccaaaaaatataaataaaacaatcactcaaaagcaatagattacctaaatgaaaaatactatacatggaataaaagatggggaatttaaagtatatagttgagttatcaaaatagtgttacctcaatatataattgctcgatgaagtgttgaagtcaaaaagtgagatccagatccagattgccactgaagcaacaactgtcacccacaatcgctgctctatctggtgtagtagccaatgctgttagaatcacaatccagattgtaggaacgtgcgactcaacgatttttgaagacatctatgtgttgcatcgtcgttaggatcgttggagtgcaagatcagattaaatttgcactttttcatgtgggatatgcaatcctatctaaacaatttaggtgagcaaataaaggtattttgcgagctttgtggagactctttcgtgtcgtcgttgttgtgttgttgccaaacaacctctgttcttacagtcgctaacctcctagtactcttctatctacgctctctgtttaccataaggaattagggttgcacttgttcttggactttcacaacaatggctgatgatacttagcatttataggagaaacatgtgggtcttagggtttcaagggaattgggccaattttttttctttattttatttttcatatttgatttgttgggccttaattaaagtccaatttagtttttttaaaatgtaaaatattacatataatataataaataaagaagaagaataagaagaaatataatagtattataagtgtaattaacaaaaaataaaacataacaaagaatataataatatgataaactaaaaaacataatatatgatataacaaattaaagaaaaatagaaataaaagttatatattatttataagtattttaggcaaggaaagtaggattttatgatccaaatcacatttttccctactcgatcctaggtaagatcttgatttcaacaaccatgataacaacaaacaccaaatcgaaggataaagtgtaaaaggttttaatcgagtaacactatagacactaaatctaaaataactctccatgtaaaatcaaggttgtggtgaatatgcatcaaaatccaactttgctctgcacaagagcaaggttgtaacaaggatgagttgaggtgaggtaaagacgcattaaggttaggtgagatccaaccaatggcttcgggtatcgtcttcatgtggcagagaaagggttaaggcaagagggagaaaggagtgtcatcctcaaaaaagagatccaatcatttcaaaattgctctatcaattttgaaacctcaaagaataaacattattatatagagcaaacaactcttacaatattgtgggcaaagtgggtttagaacgtaataatcaatggattattatatagagcggacaactcctataatattatggtcacagtgattttagaatgtaaaaatcaatgagtatttataatatgataagttggaggttggttacaaccatgagtgatagatatgattaacttatacaataaaatcaactttattgtttggggagggttcatataacatactaattgagaagtcattcaacttaatcttataactttgtcaaatagacattctctaatattttcaaagaatctgatatattgttcaataaagtatttaatttattgacgttgaacaaataaaaaacaatttaaaaaattgctataaaagcatagaaatataaagtaaataataggaccctagtgatannnnnnnnnnnnnnnnnnnnnnnnnnnnnnnnnnnnnnnnnnnnnnnnnnnnnnnnnnnnnnnnnnnnnnnnnnnnnnnnnnnnnnnnnnnnnnnnnnnnnnnnnnnnnnnnnnnnnnnnnnnnnnnnnnnnnnnnnnnnnnnnnnnnnnnnnnnnnnnnnnnnnnnnnnnnnnnnnnnnnnnnnnnnnnnnnnnnnnnnnnnnnnnnnnnnnnnnnnnnnnnnnnnnnnnnnnnnnnnnnnnnnnnnnnnnnnnnnnnnnnnnnnnnnnnnnnnnnnnnnnnnnnnnnnnnnnnnnnnnnnnnnnnnnnnnnnnnnnnnnnnnnnnnnnnnnnnnnnnnnnnnnnnnnnnnnnnnnnnnnnnnnnnnnnnnnnnnnnnnnnnnnnnnnnnnnnnnnnnnnnnnnnnnnnnnnnnnnnnnnnnnnnnnnnnnnnnnnnnnnnnnnnnnnnnnnnnnnnnnnnnnnnnnnnnnnnnnnnnnnnnnnnnnnnnnnnnnnnnnnnnnnnnnnnnnnnnnnnnnnnnnnnnnnnnnnnnnnnnnnnnnnnnnnnnnnnnnnnnnnnnnnnnnnnnnnnnnnnnnnnnnnnnnnnnnnnnnnnnnnnnnnnnnnnnnnnnnnnnnnnnnnnnnnnnnnnnnnnnnnnnnnnnnnnnnnnnnnnnnnnnnnnnnnnnnnnnnnnnnnnnnnnnnnnnnnnnnnnnnnnnnnnnnnnnnnnnnnnnnnnnnnnnnnnnnnnnnnnnnnnnnnnnnnnnnnnnnnnnnnnnnnnnnnnnnnnnnnnnnnnnnnnnnnnnnnnnnnnnnnnnnnnnnnnnnnnnnnnnnnnnnnnnnnnnnnnnnnnnnnnnnnnnnnnnnnnnnnnnnnnnnnnnnnnnnnnnnnnnnnnnnnnnnnnnnnnnnnnnnnnnnnnnnnnnnnnnnnnnnnnnnnnnnnnnnnnnnnnnnnnnnnnnnnnnnnnnnnnnnnnnnnnnnnnnnnnnnnnnnnnnnnnnnnnnnnnnnnnnnnnnnnnnnnnnnnnnnnnnnnnnnnnnnnnnnnnnnnnnnnnnnnnnnnnnnnnnnnnnnnnnnnnnnnnnnnnnnnnnnnnnnnnnnnnnnnnnnnnnnnnnnnnnnnnnnnnnnnnnnnnnnnnnnnnnnnnnnnnnnnnnnnnnnnnnnnnnnnnnnnnnnnnnnnnnnnnnnnnnnnnnnnnnnnnnnnnnnnnnnnnnnnnnnnnnnnnnnnnnnnnnnnnnnnnnnnnnnnnnnnnnnnnnnnnnnnnnnnnnnnnnnnnnnnnnnnnnnnnnnnnnnnnnnnnnnnnnnnnnnnnnnnnnnnnnnnnnnnnnnnnnnnnnnnnnnnnnnnnnnnnnnnnnnnnnnnnnnnnnnnnnnnnnnnnnnnnnnnnnnnnnnnnnnnnnnnnnnnnnnnnnnnnnnnnnnnnnnnnnnnnnnnnnnnnnnnnnnnnnnnnnnnnnnnnnnnnnnnnnnnnnnnnnnnnnnnnnnnnnnnnnnnnnnnnnnnnnnnnnnnnnnnnnnnnnnnnnnnnnnnnnnnnnnnnnnnnnnnnnnnnnnnnnnnnnnnnnnnnnnnnnnnnnnnnnnnnnnnnnnnnnnnnnnnnnnnnnnnnnnnnnnnnnnnnnnnnnnnnnnnnnnnnnnnnnnnnnnnnnnnnnnnnnnnnnnnnnnnnnnnnnnnnnnnnnnnnnnnnnnnnnnnnnnnnnnnnnnnnnnnnnnnnnnnnnnnnnnnnnnnnnnnnnnnnnnnnnnnnnnnnnnnnnnnnnnnnnnnnnnnnnnnnnnnnnnnnnnnnnnnnnnnnnnnnnnnnnnnnnnnnnnnnnnnnnnnnnnnnnnnnnnnnnnnnnnnnnnnnnnnnnnnnnnnnnnnnnnnnnnnnnnnnnnnnnnnnnnnnnnnnnnnnnnnnnnnnnnnnnnnnnnnnnnnnnnnnnnnnnnnnnnnnnnnnnnnnnnnnnnnnnnnnnnnnnnnnnnnnnnnnnnnnnnnnnnnnnnnnnnnnnnnnnnnnnnnnnnnnnnnnnnnnnnnnnnnnnnnnnnnnnnnnnnnnnnnnnnnnnnnnnnnnnnnnnnnnnnnnnnnnnnnnnnnnnnnnnnnnnnnnnnnnnnnnnnnnnnnnnnnnnnnnnnnnnnnnnnnnnnnnnnnnnnnnnnnnnnnnnnnnnnnnnnnnnnnnnnnnnnnnnnnnnnnnnnnnnnnnnnnnnnnnnnnnnnnnnnnnnnnnnnnnnnnnnnnnnnnnnnnnnnnnnnnnnnnnnnnnnnnnnnnnnnnnnnnnnnnnnnnnnnnnnnnnnnnnnnnnnnnnnnnnnnnnnnnnnnnnnnnnnnnnnnnnnnnnnnnnnnnnnnnnnnnnnnnnnnnnnnnnnnnnnnnnnnnnnnnnnnnnnnnnnnnnnnnnnnnnnnnnnnnnnnnnnnnnnnnnnnnnnnnnnnnnnnnnnnnnnnnnnnnnnnntacttctctttacttatttttttatatctttcactagatttttcttttatacatttatctttcactagatgtatacacccaataaatttattatgataatttttctcatgatttggttaatttatattgttatttttaataaaataattacttctgggagtacaaaataatgatagagagaaaaaacaattatggattcaaatttctctcaataataaaaattaacaaactaacaattaatatcaattaatatttgttaaaaaataaacactaaccttcaatcaataatggcaattttcttggaagttatcaaaatagaatagcatgtgaaatgctaaatagtcaacttatggcatgttagttagcaaaaagatttgtatatgacgagggaggaaatagcactctcccttaattggtatcacttttaacagactcacttcagccacaaatttgctcccattacatagggtagattcatgggccatagctctacaaagacattgcagccttggtcttttgcttgcctttataaacataataattaacataagtatgtttttgttaacattttttttattttataattttgtcgatttaaaaaagaatactaagattttgtttttttccccctaattaaagaaaccccaaacatgtacataacgacactcaactcactcaagtattcatccaaccaaaactataacacaacaaaataaaatcagcatctccacaaaataaaggttgctttagcaactcaactagccaagcgggctaggaaagttaattgtgacttgaaagctaagttcttttgtagcttcaaaaacttaaacatagctttattattgtcacagaagaattaagaaaagcaaaaccactttgtaaataattaacccaaaaatgaggaggccgggaggggaaagaaagggcatacccttttcctttacccaaaaagatatgtgaaagtaaattcatctttagtatccaaaaaaacgtgctccattttttaaggctttatgtgatcaggtccatggtttgtgtatcatcatctttagcatcggacaattatagttctttgtgtgtatttctcttttacctcaataagtattcatctaacaaataacttaatttacaattatcaatacaaaaattaatcctacaaaaaggagaaaaaaattaataaagaataacattttgttttacaaaatcatcttacattttcataaatataaaggtgagaatgtttattccaatatttaataagaaattatcagaaaatattcatgaatatcttttattcccaaaaactgtaaagctgggcacaaaataaaataatagtgtttgagattctctattgaattacaagctaaagaataaactacaaagttagcttcttttttttctcaagaaagttacattcctatgcctacaacttttcttcccattctaatgggatgagaaagttccaaattgacttttatttatcatttattaattaaaagaaatcaatcacactccaataaaaaatctcaatatcatattcgtttataaaaaaaacaaaaattaccttaaatattattagaaatgttaaaagctaaccaaacatattttattatttttatatatgcttaggaataacattcctcactacaaatttataggaacgtaatttctaaaaatacaagataattccataaaaaaataccctaagtatcatttacaaagaaaaacttgaaaactaaatattttcataatgttgtatactgacaaataattctttttttttctgttaaaataataattacttcaaaattaagaaatgtcaagttaacacggtcaatgtaatagttagatttaaagtcccaataaattgttatttagagctatgacttaattaatttagtgcataaaaattaaaagttaataaaatcatttattaaggatgtctagttcaattaattgagtaagatttatgagttatgataaatcttttaatattaccttctattattgtggataaaaaaaacattttacagttttaaaattataaagtaggatttttatttgaagtgttccttaaggttttgtttgggagaagaattttggaggggaaggaagggaagagaaaggtttaggtagagagatttccttgtttgggagttttaatttttgaggaaaaaaatttaaggatttttaaaactcctctgaaatcctccaaagcttaaaaatggttgtcctccctatttgggggtttttagaaggaaaagtaataaaattactatcctacctcaaccagtgttaataaaattattattctaccccagccagtgttaataaaataccaaaatacaaagcactaaatcacaattcaagggcaaaattataaaagtacttattttattaactttctatttctctcttaatatatttttaactcccaaacaaggaggaagaaacttccctcattttcctccctttctttcccctcccttctccttgaatctctctccttccctccccctcctaactcccaaacaaagcctaaaacaacgcatattgtgtatattttccttccatttcttatcattttagcatgaaaatattttttagtgtggcgcgcctaccattttttaatttctctccttgttaattaaacttaatcaaataattcaactttttaattttccttctaatttcatctctcttgccagattttttttacctatttcacttctattaaataaaatgagagcatctaaatattaaattaagattttagataacttttttgtggatctcatagtgtcacaaaaatctctatttttttagtggtagatcttattttgagatcttaggaagagaaaaagaaaaaaaaaatattcttttttgaataatatgcaaatcttaaaagttattttacaaaaaccaatttttcatgttgaaaatctcttcacattttttattaaaaaatttaataaaaatgagatattaagtttaaaatatttgttcaaaatctaacactactcctcaagtgtttctaataaagcaaaaatgcgagaattattttaattgaaacatagaatctgttgggggtatgagaatttgaccagaaagtgtatgatttgaatgaaataaaaaccgtgaatgagttgcttgctcgtgtacacgttttcttgcttcagagttaactactacgaaaatgataataattatatgttgtctcgtgtccacgcttcatgatttacatttcacatgtgtcctatttcatttgatgatcacatttttccaatttccatcatatcaacgtcatcaagcacattatttttctcttttagttacgagtagatttcttttatttgtgattagcatattcggcgaaggagaaaaaatgaataaaaaagaaaagtaaagaaattcattaatattatttgatttaaaaaaacaaacatattttttcttcataaatattataaaaataaaatgcattgcaaggattatttttgaatttttccccctattcttccatcacatttcctcttatgggagggaaaaaattaaagcaagattcacacttttttttttctttgttttcttcttatgtcaaacagaaaaaattacctcttattgatactgtatcttagaatataagatatccatcaaaatatttacattaagggtctgtttgagtannnnnnnnnnnnnnnnnnnnnnnnnnnnnnnnnnnnnnnnnnnnnnnnnnnnnnnnnnnnnnnnnnnnnnnnnnnnnnnnnnnnnnnnnnnnnnnnnnnnnnnnnnnnnnnnnnnnnnnnnnnnnnnnnnnnnnnnnnnnnnnnnnnnnnnnnnnnnnnnnnnnnnnnnnnnnnnnnnnnnnnnnnnnnnnnnnnnnnnnnnnnnnnnnnnnnnnnnnnnnnnnnnnnnnnnnnnnnnnnnnnnnnnnnnnnnnnnnnnnnnnnnnnnnnnnnnnnnnnnnnnnnnnnnnnnnnnnnnnnnnnnnnnnnnnnnnnnnnnnnnnnnnnnnnnnnnnnnnnnnnnnnnnnnnnnnnnnnnnnnnnnnnnnnnnnnnnnnnnnnnnnnnnnnnnnnnnnnnnnnnnnnnnnnnnnnnnnnnnnnnnnnnnnnnnnnnnnnnnnnnnnnnnnnnnnnnnnnnnnnnnnnnnnnnnnnnnnnnnnnnnnnnnnnnnnnnnnnnnnnnnnnnnnnnnnnnnnnnnnnnnnnnnnnnnnnnnnnnnnnnnnnnnnnnnnnnnnnnnnnnnnnnnnnnnnnnnnnnnnnnnnnnnnnnnnnnnnnnnnnnnnnnnnnnnnnnnnnnnnnnnnnnnnnnnnnnnnnnnnnnnnnnnnnnnnnnnnnnnnnnnnnnnnnnnnnnnnnnnnnnnnnnnnnnnnnnnnnnnnnnnnnnnnnnnnnnnnnnnnnnnnnnnnnnnnnnnagataaagctatacgcatgaaaactaacaagataaactctatttaaacctaaagttatgacgagtgtttctatcctttatggtttttgttttgttttcttattacttctcattttattacttgttaattatgttgttttaattgattgacaatttaaatgaaaataaaagagttaaatataattttggttatccaaaaattcattgaatttggttttagttcttgattttttttttttaaaataggtgaattcagtctctcatcccaactttattaatattttgctggcatgactaataactatcatatggatatcatatgtttgccatgtgacattaaaaacctttttttttaaatcaaactaaatctaattttgatcaaatatttaaagatgaaaatcacaattttaaaatgcatttaaggttaattttgactaaaatttcaggaaccaacacattttataacaataataataatttctcggcacacttgtcatttttttaatattgagaaaatgctctacaaccaaaacaaatttttagtatgtgagaattatttttatcggaaaataaaataaaacatttacaaataaatgtaacgtctaaattattagaataatgtctcacactttatcgaaggaagcataattttttcattgaagaccccagtgtggcatgctgatcctgagttcttacgcaggattcaattttaggaattgttgatttctacttacaggtgtaaggtaatttaattttagaagattttcaacttcaaaagaattaagtgtattgcacacatttccttttttggttaaattaaggatcatttaagtcaacctttatatagtagaggcacatgaaaatataatattgtattaaattaataattaatgatttccaataatgtaattgccaaaataaagagatatgaacaatattatttatgattatatatttttatgatctataaggaatctattatgctatttatgaaaattataaaatttgattttgaatccatagaattgtgcacatactaagatacacacatagtacctccatagagttttttatttattctgacctccacagctatttaatgatttggttaatttacaaatatatttttcaacattcttttattaatggttcttttctcttgacacaatgatcttaagtgcgaagcttatactatctcagataaattttttcattacgcgtattggaaatgcaaaagtctatccaaatacgaacatgagagcagcatcaccttagtccttgaacaacataaaaaatacaaaaacaaaaccttagactaaataatttttttttggttactcattaacaaaaattaggtggcaccatgtggtgaacgaatcaggagaaaaatgtggtgttggatacgcaactctgattcggtccttgaatcataataaagaatgaatcaaggaagtttttcttctattatatggactccctccaaggctctaaccttgttttggtcgtaaaatagtttccacccttttttagttaactcgttaaaatccaaatcccacagttgactcggttctatctttatcctttttgttgagactctttctttctactttcctctcctcctttaaaaaaccacatattctgatccattctgcatcaacctttggcttctcctcccccccttttctctctcttcacacttcaatggatattctttcttgaattctcatctgggttcattccctttttcattctttgactgaatcttcacactttcaagtagttggttgtgtggtggtacctgataaaacttaaaaaatctcttcccttttggtgtcagaaccatgggttgttgtctgagtaaaaaagggtcagagccagcagaacacattggttacagacatgttgccggtgctgggggtgctggtgtgtacaacaatcacaagagccatgaaccctttgccacccaaaccaaacccccttctcaccaaccataccaattacatgagaaacatgctcctcctcaggcaccttggaggcctccaccaagcccaaaacatgttcacaagcatgacacaatcactgggaagccatttgaggatgttaagcagcactacacacttgggaaggaattggggagaggccaatttggggttacttatctctgcactgagaattcaactggcctgcagtatgcctgcaagtccatttcaaggaggaagcttgtgagcagagctgacaaggaggacatgaagagggagattcaaatcatgcagcatttgagtggacagtccaacattgtggagttcaaaggtgcttttgaggataaacaatcagttcatgtggttatggagctgtgtgctggaggtgaactttttgacaggattattgccaagggccactacagtgaaagggctgctgcttcaatatgtagacagattgttaaggttgttaacacctgccattttatgggtgtcattcatagggatctcaagccagagaatttcttgctatccagtaaggatgacaagggacatctcaaggccacagattttggcttgtcagtcttcattgaagaaggtatattttgttatccatgcattggtcttttcttatgaatttttaataattgtggggattcctgaaaggtaagtatgtgaactgtagcatagttgtgaataatcttctaaagtttttgaggaaaattttgtataatttccatccaatttttttttttttttttgtgtgtgtgcgtgtggggaattggatgcaaaaggcatgtaagattgaaaatgatttttctattaagttctaatagtgcattgccaatgcttgacatcaatggcctgattgtcaagacttgcaaagtttgagtagcttttaatttgtttcatgggatttttttttctctccctcaagatgtttatttgaataaacttctgccaactaatttttctaaagctttatctccttttccttttttctccatatctatgcgtgcactttatcacatttcagtagatggacatctttgccactcaatttgtgccatgatttatgaattaatttttttgcaagtatggagatggaaattgtaaagtgatggcttgttagaaagggtttatctactgttaatttaaagtaaattaagtttacgaagttgacggttgataaacctcgcttacttattttatacatcatctcacttgtataaaacatactaagttttttctattaaatctttattcttcacaggaaaggtgtatcgagatatagttggcagtgcttactatgttgctccagaagttctacgtcgtagctatgggaaggaagcagatatatggagtgccggagttatattgtatatcttacttagcggcgtaccaccattttgggcaggtaaactctgagtttgatatgttgataataggataatttccttgtattagaggctagcttccccctgttttacagttgactatttttttaataaaatatgtgatgtagagacggaaaagggaatatttgatgccatattgcaaggtcatattgattttgaaagtaatccatggccaagcatatcaaacagtgctaaagaccttgttcgcaaaatgcttataaaggatccaaagaaacgcattactgctgctcaggttctaggtaggtgacttttattgtgttttctcctcattgatagtttgaatttctttcccacttgatccttttacgtgtgtacttgggtgaggttgagaagatagatcactagaggggcttagatgtattccagttctgttagcaacccaacgattgattttatttattgaatgaaaacgaatcgaaacatggattctcctctaaggattccccctttcttacaagcttgttaactctctgaatgaatcctttcacagtttcaccctttcaccatatttatctaattgatcccctccaactaattactctagttcccaactaattttcccttcacttctatctaacacataacaaggctagtggatatagttattactaatagtagtgttgcatataaaaactgaatttagggcttaaaaacttatacgtgccaagttctttccatctgtatagattattctatacccatataggtgtgacaacgacaaccaatgttgcatttgaacatgttagttgctgagactagggacttttcagagacaatattttcacaaatatactgtttcttctattatctatcctttaaacatgtcagttgtttagttacaggacattctgtatgtgatagaaaatgaaacattattgaacacaagggaagctagtaacagtgtgtgtctttgtcttgatgcagtgactcaaaactgtttcccattaatattactgctgactgatagcttgattgcaccatccttaagaattttttggttcatgaattatattttctctactaattgattccttgtattgtttaaatatttagagcacccatggcttaaagaaggtggaaatgcttctgacaagccaatagacagtgcagtgctttccagaatgaagcaattcagagcaatgaataaactaaaaaaactagccctcaaggttagtcaagccacaagctgcatgaagtgaccacaatgctcttttatgcttattgtatttgatggcataattaaacattgagacacataatttttttttccagtgttctcataatgactttaaattgctcgactgtgtgtaactttagggtgtaggggtgcatatctctacctattcaaaaataaactgagtggacttaaataatcgttttaggtcattgctgaaaatctttctgaagaagagatccaaggtttaaaggcaatgttcacaaatattgacactgacaatagtggtacaatcacctatgaggaactgagggcaggattgcaaagactaggctcaaagcttactgaagctgaagtgcgacagcttatggatgccgtaagctattgttgaattcacaagatttgccctcctttgctttttctatattctttcaagcttacactcctttgcttaaatttaggctgatgtagatggaaatggcacaattgactacatagaattcatcactgctacaatgcatagacacaggttagaaagagatgagcatctttacaaggccttccaatattttgacaaagacggcagcgggtaagtccatctactgtgaattaacatttcttcctcaatctgtcacattatggaagtaattgttttttccttctatgcattctcaacctcaattttgaagtccatgccttccatattaatcttttgactatcggattatgttttcagttttttttgataagtatttaacaagatcatatacataaatcctatttcttcctacacccaaaagcacatacattatagaatcattaaataatgaatagctctatttagaatttaaagagtaatgacacatgcaccctggtttttgtttgattacatcacaggtatatcacaagagatgaactggaagcagccatgaaggagtatggtatgggtgacgaggccacaatcagggaaattatatccgaagttgacgcagacaacgtaagcctgtttttctttttgcttactacaattttgtattctagttctatccatagttgacactcaattttgtggtttctcaggatggtagaatcaactatgaagaattttgtacaatgatgaggagtggaacccaacaacaaggcaagctattctgatgtctctagattgagtgtcctgcagccaagatggggtgcttgcttcaggtaaaggcttccaagagttaatattcatcttaggcatgtaaagattgtagtttagatttgttttgagttacatgctccgcgtgacttgttgtcaactcttatttctctttttggtttccttttcacttggaagtttattattgagtccacatgtaatttattaggcacactaataataaatggacttgcctagggaaggtggttttccaagttagattctacagtttgttaaattgaaatcctcatccggtatcctttcttaagaattgcactttcactgataaaatatttattgggtgccaaaaggcgaaatatttttgttgctggttatgatttctagcccttcgttttcttcttgaagcgatattggttggcctacggtttgtggttagtgccatgtctgatgacaaccacgtggagtcatgctgggttatgtaagggtgattgcagattagatgaattgaaattagttttgaagagaaaaattctgatctaatcttatcagtagttatttactttaccatttaatgtgttgaatttaagtttaaatctaatctaattttaaaatagtttggattgccaaacccaagttagtaacatggttgtcatcaaattcccaccattgcccaatgttttttcatccttgatatggggaatgtagtgaccactattaacagcagttcctttgtgaatagtacaactgacaagttgtatgccaattctaacagaaacagctcagagttcagacaatctatatgtgaatatatcctccaagaagacaccaagaaatacaaaatgcagaaatagaaacaagaaagcagtgctctaataaccctgcatgtgaaaatcagatcaaatgtgccaatgtgagacttaattcctttgaaacttccaaaatacactcaaaacatccaacacaaatttgggtagcttgctgaaaatgtaactatcagtcattaaagtgatagagaagcagaaatttgtaacgttaaatggggtagcacgtgctggtttggatcaccaaaccagtgaggcccactttcaagaaaatgtcggaagtttagtccattagaagtttcaacacaaaaaagccaaggttccttaatccaatgaataattatttttgctaaaccaagtcatcccaaatgagtctagattttatgttgtctttggttgaaagggatgaaaacagagaagatggaaataaaagtagatatttgaattaaagtaaaatgtattaggtatgagattcgcatgtgactcacaatttttctctctctattatgcttcccctttcctcaaccaaacaacaaattttggaatgtccaagtacccacatcttagtatgtgtttagatgagcgttgacaaaattaattttgaatgaaattgttttgacaaaatttatttttggttaaaaataattctaaaactatgtgatttatgattgaaagtttttattataaattaggagtaaaactttatataaaatttgttgatcccatgcaaaagatatcaaaagttgttttaactcaatcaattttgattttagagtcaattcttaactcttatttaatatgaaaaaaatatgtgaaattgatctaaaattaattttaaactcaaccaattctacagtgtattaaataaaaagaggttaataatagatatcatataccaatatgatcaactggcctatttaaagggattgtttgacaaatataatccttaatctatattagcatttagaattgttgattgaatccggttggcaaacaggaacacatatcatgggtttcgatatggagttggtctggtccataactccagtaactgacattgataacatttggagggtcaaccagtagagctcttaaagcaataactcttcacttggtagaactagaaccactacacaaacatatcccaggtaatgactccatatctttaacagcagcccagttacctgttgaagattgaagcagcattgttgcagtcccagtttgtcacaaaagtgaaggctacagactaaccctcacaattgaaaataaagtcctacaaacaataaaaatatttacttatcaatttaatctaatgaatcatatcaataaaaatattttataaagtatattagtaataatatttttttaataagaaaaagtctaatcatgtatacaaacaatattataaaaaaatacataatttaaattataaaagcgaacacataatctaaataaataaattatttcttaaacacgttatgccttgaacaatatgtaatttcaaatttgagaaattttttcttaattttaaaattttatttataattatagtgtgattttaattttaaacttttgataaattgtatcaaactgaatatgtctatctttttaaatactctgaatattaatattacagtaatatttatcaatcttaattaaaattgttatcttaaaattaaaattataaatccaataacaacaaaatcttatgattgattaaaannnnnnnnnnnnnnnnnnnnnnnnnnnnnnnnnnnnnnnnnnnnnnnnnnnnnnnnnnnnnnnnnnnnnnnnnnnnnnnnnnnnnnnnnnnnnnnnnnnnnnnnnnnnnnnnnnnnnnnnnnnnnnnnnnnnnnnnnnnnnnnnnnnnnnnnnnnnnnnnnnnnnnnnnnnnnnnnnnnnnnnnnnnnnnnnnnnnnnnnnnnnnnnnnnnnnnnnnnnnnnnnnnnnnnnnnnnnnnnnnnnnnnnnnnnnnnnnnnnnnnnnnnnnnnnnnnnnnnnnnnnnnnnnnnnnnnnnnnnnnnnnnnnnnnnnnnnnnnnnnnnnnnnnnnnnnnnnnnnnnnnnnnnnnnnnnnnnnnnnnnnnnnnnnnnnnnnnnnnnnnnnnnnnnntttataaagtatattagtaataatatttttttataagaaaaagtctaataacgtacaaaaacaatattataaaaaaatacataatttaaattataaaaacgaacacataatttaaataaatcaattatttccaaacaagttatgccttgaacaatatgtaatttcacattgagaaattttttgttaattttaaatttttatttataatttttatttttaaaattattaattgtgattataattatagtgtgattttaattttaaacttttgataaattttatcaaactgaatatgtctatctttttaaatactctgactattaatattacagtaatatttatcaatcttaattaaaattgtattcttaaaattaaaattataaatccaataacaacaaaatcttatgattgattaaaattaacgtgttttatttgttttaaataaagttattatttaaaataaaatactctataactttacatcaccaaaacatattattttgaaatttaaattatattttctaaattcaaattacaatcttgtatatatttcaatttcaatgcaattaaaaaaaatagatagaagattataaaaaaaagaaagaatataaatataattttacttgacaatattacattagagtaaaatttagttgtcttgtcaatatctatatgaacttatctacacaatattatattagatcagattttactatcataattatatattatcttatggtttatctttattaagttttttacacaatctttctgttacagaacagttatatctacatagagtggcaaacggtgctgattatccagttatatctacattagagtggcaaattatctttttacatccgtgtagtgtatatattagagaggtgaaggaggataataggagatcattagaaaaagaaagaaatcttctaatctgcaaaagtgcaacttaagggaatgggtactgcaggtggaaagaaagaattcgggcatggagaagattcatcagcttctattccaatgaagacggtggttcgtgactttcttgcagcaaaagaaaaacacctgcagcatcctgaaatgggtgcgaagatcagtctcgaaagaaaagtcgaaaaagaattagaaaataattataacccatcaaagagagtcaaaagcgaatccgaaggggctagttcttcgcaacatggcaaatcaaagtttgaatatttactagatgcagtggcggccttatttactgaatatgaagaagaacaagattgcctccaagaaagggaagatgctagaaacgaaagaaatgtgggttatgagcaagggccacctgatgaacttgatggattgccaagggaatttcaagaaaagatccaagagttgaatggatgtgaggtgcagtttgtgacgcagaaggaacttttcaaaacagacttgaacccacagcaagctcgcttgtcgatcccaccttcaaagattgccaacacatttctgacaccacctgaggagtcttccttaaacgagcgtcgaggtataaacaggaggctttctggcatgccagtgatggtgttggatccgtctttgaaagagtacaacatgtgcttcaagaagtgggaaatggagagaagctacgtctacaacttgaccaagggatggaaccagattgtgtgtaacaacgatcttaaacttggtgatacactgcatctctggtccttcagactctcctctaagctctgttttgcactagttaagaatcaagttatgaatacatccgcgccaggatcatgatttcaaaatataatcttcaaattagatttagttattttgggagtttatattttgtttaccgtttctgttattcaattttagttattaaactagttttattctaatttttgaaattattcatgttctttatacttattctagtcaataaattattgtaaaggctaaaaatataatgttagaagctgaattcagagttgtaaagtgtgctgcatttagaggtcaagacttattctcaaaatataatttggcttgataatttcgcatcatttactaatcattggtctttaagaagacttattctcaaaatacctatatatactgcggatgatttgatagtattccaattttttcgatttgattttttaaattattatatttttattagttgtaaaatttgttaggtttgtgtatacttatatctaggtacagagagagagagtagagaaatgaaacctctaatatgcaacgtagatacataacaatggcaaatgaggaaaagaattcgggaggagctgtaaaaaaagaaggtgattcggttgatatatttttgaggaagggtatccgtgcctggcttacacaggaacaacaaaagaatcctcacttattttcattcctccaggatgacgacactgagattttgaatagcatcctcagaagacaagaccaaagaaagagagaagaagcaagaaagagagaagaagaaggcacgtccaccaaaggtgctagcaatagcagtgctaataataatgttggagattccaagaattacaaggccatgtgaacaaattaaagattcaagaaatgaagggatgtgaggtgaagtttgttggaactagctctccctagatctctgaatatctacaagcacttcttcagtttatctttaattcaaaaaataaactctatgcatttgtcttcaagttcaaacaataactctgttgcataacaatgttatatatcctttagttgtttatgtaacaattaccctgtgccctgtgctgcatgccagattagtgaaggcatcaaaggcccttgcatacgtttatcaatccatcacgatgataatgaatcatatttatctcaaatacttgttagatttcgttgcaatcaactaatcatgatgataattaattataagttttattaatgattaataataaaggttttaaattgcaattacaatcaattcattaggttaaaaactaatcttattcgtacgtgatgactactgattcaactttttttttttttgcatcaaatacaattttttcactaaatacatcatttttccatatatgaatgcaatggagcattacacctttatatcaaccttatgaattaaaaacaaaatatttcttttacatcatgcaagtacatataattcgtagggaaaataggaaaaaaaagaaagaataaaatgtttttgtgtaatagagacattaaacttggaactcaaacgttcacaaatacaattttttagaccaagtaggaattaaaaatgagctaggaagatctaatgttgaaggagagacgaatctgtgagaaaggaggacttgtaaacaaagcaagagcgaattgagaagaataggtagtggtggggtatatatagtagcnnnnnnnnnnnnnnnnnnnnnnnnnnnnnnnnnnnnnnnnnnnnnnnnnnnnnnnnnnnnnnnnnnnnnnnnnnnnnnnnnnnnnnnnnnnnnnnnnnnnnnnnnnnnnnnnnnnnnnnnnnnnnnnnnnnnnnnnnnnnnnnnnnnnnnnnnnnnnnnnnnnnnnnnnnnnnnnnnnnnnnnnnnnnnnnnnnnnnnnnnnnnnnnnnnnnnnnnnnnnnnnnnnnnnnnnnnnnnnnnnnnnnnnnnnnnnnnnnnnnnnnnnnnnnnnnnnnnnnnnnnnnnnnnnnnnnnnnnnnnnnnnnnnnnnnnnnnnnnnnnnnnnnnnnnnnnnnnnnnnnnnnnnnnnnnnnnnnnnnnnnnnnnnnnnnnnnnnnnnnnnnnnnnnnnnnnnnnnnnnnnnnnnnnnnnnnnnnnnnnnnnnnnnnnnnnnnnnnnnnnnnnnnnnnnnnnnnnnnnnnnnnnnnnnnnnnnnnnnnnnnnnnnnnnnnnnnnnnnnnnnnnnnnnnnnnnnnnnnnnnnnnnnnnnnnnnnnnnnnnnnnnnnnnnnnnnnnnnnnnnnnnnnnnnnnnnnnnnnnnnnnnnnnnnnnnnnnnnnnnnnnnnnnnnnnnnnnnnnnnnnnnnnnnnnnnnnnnnnnnnnnnnnnnnnnnnnnnnnnnnnnnnnnnnnnnnnnnnnnnnnnnnnnnnnnnnnnnnnnnnnnnnnnnnnnnnnnnnnnnnnnnnnnnnnnnnnnnnnnnnnnnnnnnnnnnnnnnnnnnnnnnnnnnnnnnnnnnnnnnnnnnnnnnnnnnnnnnnnnnnnnnnnnnnnnnnnnnnnnnnnnnnnnnnnnnnnnnnnnnnnnnnnnnnnnnnnnnnnnnnnnnnnnnnnnnnnnnnnnnnnnnnnnnnnnnnnnnnnnnnnnnnnnnnnnnnnnnnnnnnnnnnnnnnnnnnnnnnnnnnnnnnnnnnnnnnnnnnnnnnnnnnnnnnnnnnnnnnnnnnnnnnnnnnnnnnnnnnnnnnnnnnnnnnnnnnnnnnnnnnnnnnnnnnnnnnnnnnnnnnnnnnnnnnnnnnnnnnnnnnnnnnnnnnnnnnnnnnnnnnnnnnnnnnnnnnnnnnnnnnnnnnnnnnnnnnnnnnnnnnnnnnnnnnnnnnnnnnnnnnnnnnnnnnnnnnnnnnnnnnnnnnnnnnnnnnnnnnnnnnnnnnnnnnnnnnnnnnnnnnnnnnnnnnnnnnnnnnnnnnnnnnnnnnnnnnnnnnnnnnnnnnnnnnnnnnnnnnnnnnnnnnnnnnnnnnnnnnnnnnnnnnnnnnnnnnnnnnnnnnnnnnnnnnnnnnnnnnnnnnnnnnnnnnnnnnnnnnnnnnnnnnnnnnnnnnnnnnnnnnnnnnnnnnnnnnnnnnnnnnnnnnnnnnnnnnnnnnnnnnnnnnnnnnnnnnnnnnnnnnnnnnnnnnnnnnnnnnnnnnnnnnnnnnnnnnnnnnnnnnnnnnnnnnnnnnnnnnnnnnnnnnnnnnnnnnnnnnnnnnnnnnnnnnnnnnnnnnnnnnnnnnnnnnnnnnnnnnnnnnnnnnnnnnnnnnnnnnnnnnnnnnnnnnnnnnnnnnnnnnnnnnnnnnnnnnnnnnnnnnnnnnnnnnnnnnnnnnnnnnnnnnnnnnnnnnnnnnnnnnnnnnnnnnnnnnnnnnnnnnnnnnnnnnnnnnnnnttacgttgaagtttatttattacaaatacttaaattaacaattaatagcaaagatattataaattttatataatattttgtttatatgctacactatatgaaataacaaagagatatatttggataaaaaaattaattcacttgaatggaacattaaaaaatataataagtacaaaattaaaatataatgtgattcaaaaattatttttccattcgagatgaaagtaaaataaaataataaagtaattatttgacacgaatttgttatttggtttatattttacaaaaacattagaagtatttgattacttagcttctatatatgtgtgttacatattacttgtttcctttaattttcatgtgatatagactaagtgtcttgattcatggtcctttctcttttgttaaaaactttccttttgcattgcaatattgaaaaagtagccgttaataactctactactatacaaatactcttggcaactaaaacatcaaatcttatgtaagatatcctccctctcacacgagcaaaatatagaagagaagaaatctttcttggatgccaaatattttcctttgatttcatttctttttgtttatagatttgatatcacgatgtctggtaggtgtgcagcttgcaagaatcaaagaagaaaatgcccttcagattgcattttctttccatattttcctgccaatgatcctgaaagatttgcgtgtgttcacagaatctatggtggcagcaatgttggaaaaatgcttcaggtgttttaaatatagataataatatttgatatcaatgtgtttatgttagtctataatatggaaaaatttatcaatatatcaaagttagaatatgtcatccaaagtcaataagattatgttactaaataacctttgtatattttgatgttgcagcatattccatcatacttacgtgaacaagctgcaagttctttgtattttgaagcacaatgtaggattcaagaccctgtttatggatgtgctgggattatctctaaattatatgaacaaatcaacagtacagaaattgcacttgcccatgtccaaactcaaattacttgtcaaaagcttcaagtcccacgggcaaaagctgaatcaaacttcaatgtcttgtcaacaattgaagctgaaccaaactttgatgtcttgccagcacaaagcagcagcacagcagaatttcaatgggaaagtcaagttccttggtttagttaaaactaccatttccaattgatacaaagcatttgatttatatttactatgatgtcacaaccattttcaaaacctcaattgctttaggagtcttttttttctctctgtttttgttggaaaacatagaataatgctgaaaagagttcagtgattcgtagtacttattattgaataatatcgttgtttatttgttgctattttataccttatacacaatcgcaatgttaagcataagcattcaagaacatgtcttctttacccaaaaataacaagtattcatgtgtgtaactctttaaacaatcaaaatactaatataaaatgctcatagatttcaattttgaaatatttattcaaaatgctcacatatgctctagctttgccaagatatttaaatactaaatttgtaaaacataaatataaattaaattatataactaaataaaatagacttactcaatgatttcttttgatttagaggaactattcataaacttcaattgaaaatatttttagaaattattcaaattctttaaaatggagaaaagatataacatcttgaagtagttaaaaaaaaaatttaaaaaatacgaagcgtgacttttatgttttaataatcataaaaaattatttacctaaacaaccatccaaaatatgtaccaaaatgctattattcagagtaggtaattggctattttttcgtacccaaattgacttttgattcaccgaaatctcaacattctaaatcgggttaaataagattttggtgttatagtatttcaaatttcaagttttaattcctataattttttcttatttttagttatttgtttatcatgattagtgtttagggagttaatttttagtcattttgatgtctatttttagttcctctgagcaactaattattgtatttttagaatcacttagcaactaattattgtatttttagatcacttagcaacttatttaattcttcttaattttatatgttttattaatagagttcggcttttcaaatgaacatgcttttattttatttcattttaaatattaatttaatttagttgtattaatataatttgtttaaataattaaatatattataattaatttttttatttcaattattttaggggttaaaaatgtgttagaattaagatttaagattttgtactaaaagcatgcattttaattataaaaaatgatcaaattgtatttcagaaagccttaaaaactaatatcttgattaaaattatatatctataaataatataaaaattaatattgattggtcccacaacagaattaaaaataaatactatatcaaaatcaatatcctaaatggtgacaggtctcaccagtaaacatgcgtaaccttatactaaaaatactagattctccaacaatttaaagatcttgacgtggacttgtaggaaaatgtggattttaaaagcagatccaaacacactattggatttttttttctatcgctattgcacacacaaaaaatgcataaaaagttcattagatccttgcttggccagaaaactaacacaataacacattggttttttttttttttttttttttttttttatcagtagaataacacataggttacccgcacaatgaacgtgctgaataataatctcccaatcccttttaactagtgcctgaatattattgattctgcccaacatgaaattttaatagaatttttcatttgaattaagttccaacctaatctagacctaacaatatatagaataagattgaaattgtctgatttgttaacatgacaatgacatcaatttttatattatatataattaaatcacaaacttgataaaaatatataattacaattaaaatatattttaaaaataaataagtaagaaaatataatttaggtaaaacattgtgtattaaattatgtctgtattaaattatgtcagaaagttcaatcattaataactacgggtaaagttagtgagacagataagtcatgaacattactaattatagttggcttatttttaatttggtgtactatttgattagttgatgtcgcataaaatattttaaaatgtaatatcaaatattgcattttgatacttaaaaataatcatcttaaattttgtgtgtatatttgtcataatcacatcacatataaaaaagagttaaattgataaaatttaccactcgctttaaagttatgtacttatgtgggtgcgttgatcctccaaaataaatatcctaatagtcaactatgaaactttaggtacttttaaattgaaaaacttgcaagttttgaattcataacttgatctctcggagggttatgcacctgtagctggcttctttccatcaatgaacaagcccatggttttgaaccaccgcatcagatttcgatgttccttcacatatagccacgcttgaagaaatttaaagaggctctcgttcactcctcgctcctcaatgtaactgtgaaacgcatctctcatcttttcatctagttctctgtcatttacagaaaagtcagtcaaaactaaaaaaaatgcctgcggcacaaaacataagaatttccaagcgaagtttaacaggtatatgataaaacacaaaacgggcattctaggacaacacgcgtattcgtatcttccaaaagtaagaaattttttcttctcccaaaatgcaaaacacaattccgcagtttcttctctaagtccagcctatcttttctcagagaaagagcatcaaaatgaatcaatcacatcacattgacattgaccttaattaaacactcacaattgagttccaaaatgaaatgaagtaactcgcacggtagagatattttcaacaatagttattactataataataaataaaataaaaagagccaatacaccactactccttacagcaattgaagagttctgagtggagggcattctacttcatctccattcttttaatcctaaattcctaatatctacaaaaaaattaaatgcttcttcccaaaatctacattttatacctaaatatagaactcggttttctaagaatttgggttttgaacttaattcaatctcaaaatctaacttagagggagaagtgattccccacctatatatactattttggtcgtatcaatagttaacgtgaaatctccaagagacatgcttaccccggaaattacacacaacttatagcttgcaagattgaatatttgtaggtgatccaataacaacacctgataacgagtagtctaataaatccaacaacaaccactaggattccaatgccatattagaacttcaaaatctaactcatgcgataagtgttgttccccacttaaatcatatcaccagtaaacgtggaatctccgtccatgtttgatatatctttttccaccttatactttcatatactctagagattgcaatgacattaatttaagaatttaacggtgatgcacggacagtatatagttttgtaaaaatcaacaaacctactatccgtgatttgtgattggatgattttacactatgagtgcatactttttttcttcttcgtaatttaattaccaatctccagacctacgctacagaagcataaaccctaaacaaagaaaaattgagagcaaagagcacagaactgacgcgaaaacagggccggtgtattgggaggggatgaggaggtagccggagtcctggaccttgggcctcatggaaacagagtgaattcccagagcatcctcgtacaaaccgcagaggaaaatcaaggattcgttctgctgaggtttggagacgtctacgtggatgaagagctggtcgatggcggaatcctcgtcttcgggggtcaacaaccgcatgacatagatgctcacctcttcgtcgccgtagctgcgcttcagaaccggaccgtgcgagtccagagctcccttcacgatcgtgaacggcgacggaggactcactttctgctaggcacgtgccactctcacgtgagttagtcaatgtctaaacctaaagtaaaaccctagtacataacagagtgagagagagcttacagggggcatgttcattttggcgacttcttgatagtgatcctttagagagcggaggagcattgagttcaccgcggaggagatgccgtcacctcccgacgaatatggccgccggagagcacccacggcgccgaccaaggttctcttccacatttctctatcttttccttctattcctgcgctgtatgagattgtgttgtggcagcagctcaacccaactcagactactcaactcaaacatttcaacaaaattatattaagagtttaatttattaatcaatcacaaataattttaattacaatttttagtatttattataaaagctaattatcttactatgtatatataatttactttcaaagaacaaaaaccatttttttccaacaaattattatgattgtgaaaataataaaattgacaattttattataaattaaagtttgataatactagtagtatttactattagaagttatttaattttattttctcattttttctatatagttaatttttaatataaattaattaatataaataattttatattttttaggcataaacatttttttagtcgttttttcattaatccctcaacttttcaaaaaattaagtttaatacctccttgttcatcaattcatggtttcataatttgttccaatttttaaccatcaatcaaaatttattattatcaattttataaaaagtgatttataacaattttaaattatcaaaatatttgactcgtagtataatttggtgacactttttgtatattttgacaattttaaacaagaaaaataaaaatatgaatgtgaacttgtgacgatttttaaaatatttttatgattttaaactgtcacaattttttttaaagaaatcaaactaaaaaaatatatttttgatggtaaaaaatggttacaaattataatatcattaacgcaaaaaataaaaaggactaaaaacaacttttcaaaaaaattgacatgttcttttgcaccacaaaagtgttcaaacacaagctaaaatcaattatacaaaatcaagtttattgaaaatgaatttaagaagctccaattcacacacatagtatatgtttgatttgtaattgaaattgttgtaacacacattttaatgcaaatccaacagataaaaacaaaataaatgcaaaagcaagaatcgtgatgcgttggcaaaatgacttttgcctctaatgtaattttaaaacggagaaccaaacatgcacaacaattgtagcttaaagcctgttgtcatctgactcaaatcaaaattatagttgcagctaaaatttttgctttagaaaatttgtttctccgtttgagatatttcaaaacagggtataaattgccagacactgtcctttttctcatcaaccattctcataatagtcgattttaaacagttttgacagaattgccatgcatcacaccattccgcaaaacaatgccactctcagcagaagcaccgttaggtagcagtaccacatcaataactttgggccaaatatcatgcagaaagaatcctttatccttctgaatcaagagcttcttccaaagcaatgatgttggaaaattaattttacatttccacaataaatggaacaaagcaacaggcaatcatatttcttccataacatgggcaactgaacaatttttcattttgtgagaaacctcaaacaaggcacaaattgaaagccctgatctttctgacttgtcaaaggagatatcttaagattcaaaatctgtatgaccaacaacttcttactatatacagaagaagttaatactactagtacattttggggcaactgaaaaatgcatgtgatgtgagaattctatgagcttcggccatgaagggacttgcttgcttgtgaggctaagaccattgccttggctcttgtgctcatcagcatcaattccctcactgcacgacgctgatgttgccgggcatttttagctcgcttcggagctaatcggttgtccctttccacaaatgcaagtctgaatttttcagctactgataattcagtggaacttgaagatggagagatgggcttcaatgcaaacacatgcattgtccatgttctgggatcaatatccttgacaacttcatcatccaatatgatattttgtaatgcttcccgaggaacctcagttcccttaaacccaaagggtgatgacttaggatttactacaacacgtgggcactcagtggaaaagtcctctaaagaatttttatcaatgtttggctgcaaataaaataaaataatcacttctggaagaaatgtcggccatgaaaaagtattaaactattagcaacttctattttctatatgcaatgagaatcaaagaaaaatccttatccatgatgcctattttttcctaattctcactccatcccccattggctggaggaagtgcagcgtatatgtccctacaccaaccaatgctatcataaaaacaaagacatgaatttttgcatttcagtaaggacaaaaattggcattcaattacaaattagacaggagttttcaagttcatacccatactagccacctgagtgattgtgccccactagcaatttcttttgtatcaagctcctcccaagaatcctcctccacataatcatcaaaccttggtttaaatatacccaagcatcttcgtgcagtgttgtcactccttggacatcctctgcaatattagttatggttcattgcctgttatgagttttgtaatgatgtaatcctagtcaaaacacagtcttgtatccaatgtgatttattagacaaaaatcagtgtgtaataaagtaggaaattactaccatgaaaacaacaaaaaagaaaagaaaagaaaaagcaccctaaacgattttaaaattacataattttccacctttttaatttaatttgatttttaaaacaaagagagaataaatatagaataaatttcccaatacctacaacttcccaagtttcggataacatttgcttcgtgagaatagacatcaattttttatatcaaagccaatttttggcattataaataaatgagtaagtaaatatgttttgatcatctttacaagagaactcaatttacagatcctatcgacaaaagtatgacagatacaatagtaacaagaacatggtacctaaagggcccattgaagcaaaattacaagttttcagattatgtcttaaatgatcgacaaaatacagtctaaaacaacacaatgaacaaattgcattaacaaagaaataaaacttaaagtggataacataggatatgtacccgcatctcaatgtctccaataagtggcagtgcttcacaagctcggatataccattagcagtaattttggtgcaccggctgcaaatagtctcaatatatcaagtgattctgaaagagagagaagtataatataaaaaaacacactacaaaactacaaaaatgattgttagcatcacatcaatcctacaatatgctaacctcaaggcaagttgttgacggaccaaaaactaggtgaagaaaattaataataaccacatccagtagaagtaaaaccatgaaatacaattaaaattacaatggaagaggaagatctaagcataaaactcaatctgcattcatcactcacttctaataaactcatgatatagttcaaacagcaaaatattttctcaaaatgtgcctaccagctggtccattgaatgggacatatgacatgctcttgtagcatcaagtaagcttcagagttaagactacaagctagagcatattgcatgaaatgtcttctgaaatttgaatatacatgaaaagactaaatattatgaaaattcttgttttttcagattatttattctcatttctcagacatcaaagattgattgcattacaattaaagcatagtaattgtttcatttttttaataaaaaaagttatagttctataccttatatctagagctttaatgaatctacatacttcagctgcttttatcaagccaaaatcagagacatctgagccagagacatcaaggatttcccaggaagtatcagctaatgcgatcaggatatcatcattcagcaatttccttcttctagcaatagctgccactgctatctgtcattaagcataactaacttttttatttgtattgtatgtatgtataaagtacatgatgcaggatgaaggattctttttgttcttttttgggggaagacacattataatcagagatttttaacaagggataaacaaagaagtgtttaggacagtgagcggaacacaagtttcaaacacttaagaatattaaccgggtgcctcaacaaaggatatttctttagcaaagaaagcgggaaatcctggagaaatctttgtttcccacacatttacattgagaacactataaatttagaatttcacttgttgacaagtatgagcattaggataaatgacttattaaaggatttgaagaatcagaatcattctctagcaacctacctttatatcagctggcaagttgatagcaatttcactcaaatctgcaacaatatcctccaaatgtcttccaagaactccaatgcaaagactgactaaactcggtggctttgtcttcttaggcagtaatcctgcaccaaaatttctcaaataatttgttaatgcctattatgtggcacatgcttatgaaaaaataattggtgcatcgtgccaccaaggtttaaaccctaagatctcatttaaactaccaaaacctctcacaactaacacccacctagtgtctccttcaaagagaacaaattttagtcattctattcaggggcaaaactcaaactgagcttccattgtcagcataatctagtcatacaaacacagagtctaagggcaaaaccaaattaaacaatgagcacttgccacaaaaccaggcaatatgatcaaaactgaaaccaatcgcagtaaaaggcccaaatgagggttgaagtgtttttttgtttgttttttaagttttctacttaaaattatcacagaaacaaagaaccactgcattttagagttagtattgttttgtcaacggtctttcaatttcaattgatccccaaaacagagcaagtgcaattgatcatgggtcaatgaaaggtgaaagctttaccaaaaaccaaacataaacataacaccccatctctaaaatacaaaagcagattgaaagagagaaaaaggggtttaaaaaataccgggaaattgagggtgggtgattgaaatggaagacttggatttgacgttggatggtggattcaaatcgaggttttgcaaagaggtcgctaatgccttgtcacctttacctttatccatccaaaatcaaaatgaaaaacgatgtaacagaacgtgcccttacacaatacctcaattctgaggaaccaaatttgacggtgttatcaacttattctagtctctctctcttcttgtgttctgaaataaacgaagccgactttacttgcgacctcctttggaaaaattaattattttctgtattaattttaatatattgttgcctatcgattttgttaaaaaataagtagtacggttactacggtatacagtacatttttatttttacataataaaaagttataacagactaatacttttcaatatataaatatgttatattaaaatttataataagtaaatatttttaaatatatataatttatgtttaaatttataataaaaaattaagttataatttaaagttatttttttaactattcttatgtttttttagaaaaaaaactgttaaaatataatttaaagataaggattacaaaaatggtatattgaaatagactagcagttaaaatgattaagtatatatagnnnnnnnnnnnnnnnnnnnnnnnnnnnnnnnnnnnnnnnnnnnnnnnnnnnnnnnnnnnnnnnnnnnnnnnnnnnnnnnnnnnnnnnnnnnnnnnnnnnnnnnnnnnnnnnnnnnnnnnnnnnnnnnnnnnnnnnnnnnnnnnnnnnnnnnnnnnnnnnnnnnnnnnnnnnnnnnnnnnnnnnnnnnnnnnnnnnnnnnnnnnnnnnnnnnnnnnnnnnnnnnnnnnnnnnnnnnnnnnnnnnnnnnnnnnnnnnnnnnnnnnnnnnnnnnnnnnnnnnnnnnnnnnnnnnnnnnnnnnnnnnnnnnnnnnnnnnnnnnnnnnnnnnnnnnnnnnnnnnnnnnnnnnnnnnnnnnnnnnnnnnnnnnnnnnnnnnnnnnnnnnnnnnnnnnnnnnnnnnnnnnnnnnnnnnnnnnnnnnnnnnnnnnnnnnnnnnnnnnnnnnnnnnnnnnnnnnnnnnnnnnnnnnnnnnnnnnnnnnnnnnnnnnnnnnnnnnnnnnnnnnnnnnnnnnnnnnnnnnnnnnnnnnnnnnnnnnnnnnnnnnnnnnnnnnnnnnnnnnnnnnnnnnnnnnnnnnnnnnnnnnnnnnnnnnnnnnnnnnnnnnnnnnnnnnnnnnnnnnnnnnnnnnnnnnnnnnnnnnnnnnnnnnnnnnnnnnnnnnnnnnnnnnnnnnnnnnnnnnnnnnnnnnnnnnnnnnnnnnnnnnnnnnnnnnnnnnnnnnnnnnnnnnnnnnnnnnnnnnnnnnnnnnnnnnnnnnnnnnnnnnnnnnnnnnnnnnnnnnnnnnnnngtttgtgttaaaaattttgctcaaggtgaggtgaggattatattgtgtttggatataaggttaaaactgttttttttaagagtttttttattgaaaaaatttatatttttaataatttttttttcaaacacttataactcttatgtctaatttgttatcgtctcaatatgtattaataaatttaattgattatttctcttaaaaaaaagtctcattgtttgttatgaacaaaatcatacagtagtattagtgatgatatatagtacagattaaactcataaagtattaaatatttcaaaagtaggtttggtttgttacaatcggcaaaaccaaacatacatttgtcgtaactcgtaattaaattagttaggcttttgtcaactgggcaactgtccagtgtccagtctacttaggtgtaaaaaagcgtcattttttagagtttaatttttatgtagtgttagtataaaatatttccattattaattaatacttaattagtattctttttctattatacataaatataaatatttgttggatatttttaaaactatacattactaattctttgtgtattttgatgtttctaatcatttattcattttttattaatcccttatttattttaatatatgtatgctaattcatataaatgatattaaaaatttaaaaagggtacaaaattatggttgatatgtttttaattttttttacaacgatatgttttctaaaagttaataagattatcatataataatacatataatcgacattgtaaataaatgataatataatttttttagatcatccgtgaagagattagttactttttttatgtaacacttaaaatattatcattttaagtaaaaagattatgcttttcatatgaattcccattccagttagtaaaaatgaaactctccgttttaaaaagaatcagattcattctgattcgaacgtaatataaacatatttatctacttttgtttaacaatataaaactttgaaataattcctttattttattataaaagatagcagtgaagacgacattacttcaattcacagtaaacaaaaaattttgggcccaaggagcattcatagaaaaaattacatttactttactttaagataacaagtgagagtttgaatttatgacttgaaagataaactcagtttcatttcattggacttgcttgagttttgttttttcttccaataattcatgacacagtataaaaacttttatgattaagtaatttaaagtttaatttctgttgccatgattttatccttttaagaaaagttaaattttaatataagaaaaataaatttatagattacacttcaaactcgcgaaacacgttgaaaatacaataattatttgtgtctaatacttaaaggggactttttagtctttaggtaacactttaacgtttgataattggtaagcattgactagggacaaaactcacataactactccatttgatataggtgtggtgtgctatactttagtaacgtagtgagctaatcccacttgcgtgggtgagttaaataaaaatgcgggtaaaatctatttttggttcttgtatttttatttaaaattagttttaggttctgtattaattttcaaattgattattttgatcttcaaaatttaaaaaatatgtaaatttagctccttaacagcattaacattgttaaaggaaaaggactaactctgcatatttttcaaattttgaaaaccaaaaatggttgatttgaagttacgaagattaaatcctattttgatccgtttaaaataaaaatattaaataaaagaaattttgaaaaaatattttaaaaaaatttaaatgttacaacttatttattcattttaattttaaaataaatagccaatgtactaatagtataaaaagatattaattaattttacaataatttttttaatattnnnnnnnnnnnnnnnnnnnnnnnnnnnnnnnnnnnnnnnnnnnnnnnnnnnnnnnnnnnnnnnnnnnnnnnnnnnnnnnnnnnnnnnnnnnnnnnnnnnnnnnnnnnnnnnnnnnnnnnnnnnnnnnnnnnnnnnnnnnnnnnnnnnnnnnnnnnnnnnnnnnnnnnnnnnnnnnnnnnnnnnnnnnnnnnnnnnnnnnnnnnnnnnnnnnnnnnnnnnnnnnnnnnnnnnnnnnnnnnnnnnnnnnnnnnnnnnnnnnnnnnnnnnnnnnnnnnnnnnaatagaataagaattatggtatatgtggaatttttttacttaatttatactcatatatatggtcaaatatatacatttttaattcaaaagtgagtaagagtaaattaatataattatttataattatccatgtgataatgttaaccacttttaagattcaattaactattattattagataatactaatatctaagaatatctttaataccggatcttgagtataaattttaagatgaagatctaatcttgggaatagatcttaaacagaagatatgatcttggggataaatcttaaggatgtggaacgagtatttggtgtgctataatctcaattcgtgattatatgtagttcatcgcatgcctggaacatggatacaatgaaaaatataattttggcatgcattatattacataacatgattgtcgaagacgaacgagatacatttagtggtaatatcgatgttgattattatcacatagacaatgacatttcaaatgttaaagcatctcgtgatactctcctgattttactacatacttgcaaacaagacatattatgtgtacaaaaagaattgatcaacaacttcaagcatatttagtagaacatatttgagaatgttatcgtcacaacaataataaaatttaattttttttggcattaatgtgttgtatttttttattatcaaatttatgtattatttattattttaacatttagtcataaataaaaaataaatttatgcttattttcctatttcttaatatttataaaaaaattcttacatgttttattaattaaatttaattacttaattaattatatttaatttaataaatatttatataaaatatttaaaaataagatctatataggacctattaaaaattatctaagatgagatctaccactaaaaaaatgaaaaaaatctaaaagatttttaattttatgtaacacattaaaattcataaaaaattatataagatttcaatttgattttataagaaattatatctaactttttattcctttataaaaaaaatataactttttagttttttctcaactaaactaattgatgaacttaaacctgctttaaccaacataaagttagcagctagctgaatttcacaaaaaaaaaaaannnnnnnnnnnnnnnnnnnnnnnnnnnnnnnnnnnnnnnnnnnnnnnnnnnnnnnnnnnnnnnnnnnnnnnnnnnnnnnnnnnnnnnnnnnnnnnnnnnnnnnnnnnnnnnnnnnnnnnnnnnnnnnnnnnnnnnnnnnnnnnnnnnnnnnnnnnnnnnnnnnnnnnnnnnnnnnnnnnaaaaaaaaaaaaaaaaaatagcagcctagttttccctgtctatttaagcctagttcttgtgcccattaatgcagtcaggtccacctctcacattaacatatcaagcaactagcttctcaaattgcattcctattacataacataacaccctccatccttggacttaattcacactcccaacgcttcctctttctcccataaataccttcattcatttcaacaccaccaccaccaccacttcctcacttttgttactttcctagtttttctctcaatatggttatggttggagcccttctcctcaacgccaacttcaagattcatttctcacgcatatcaagccaagcccctgtccccttacccgtcaagcccgcatcgctcagaatgcccactccctactacccccactgggcctccttgcaggccgacattgaagcccacctcaaacaaaccattcccgtcaaagaacccctcgaggtcttcgagcccatgttccaccttgccttcgccgccccccggaccaccgtcccggctctatgcctcgccgcctgcgagcttgtcggcggtcacagccaacaagccatggccgcggcatcggccttgttactcaacctcgccaatgcacacgcccatgaacaccttcctctaaccgacaggcctgggtccaggcccatgtacggccccaacataaaactcctcaccggggacgggatggttccgttcgggtttgagttgctggcgaggcccgacgggccagcacgtgcgagcccggagcgagtcctgcgtgtgatagttgagatatcacgtgcggtggggttggtggggttgcaagaggcgcagtacgtgaaaaaaacgttgtggaagggtgaatcggacggtggtgaggaggtgcaacacgtggaaagcatgcaacgcgttgtattggagaaaagggacggtgggttgcatgcatgtggggctgcgtgtggtgccatgttgggaggtgggagtgaggaccaaattgaaaggttgagaaaatttggattccatgtggggatgatgaggggaatgctagaaatggggttcaaggaaaaacatgtggaagaggagagagagcttgcactcaaggaattgcaatttttcatggacagagatgttcatgttcttcatcttatttctagttttctttattaatttctagccagttttaaggaatctatctggaatctcaagtgggttattatccatttacatatgtacggaacaatggaacatgatcaactgtgcagttcataaagaataattgcacgatcatgcgtttcaaatctgatggtatgtatagcagaagtttttaaattatattttactttataattttactatatggagactccaatcttcatatagtatgatggaggtagatctaatgtttttttttggttgtgtgaggagagaaataaagtagaaacaaagtattgttaggttgtttggttttaaaaaaatatatgagaattaattgagtgaaaataaaatgataaagttataaaatgttaagattacatattatttatttgtgataagatagcaattagtaatttagtcctcattatttattattagattgattatatgtaatcaatattgatcatatttgttcattataaataaatggttagtgttgtcgtccttaacacataaagtaaaatattgttatatgatataaaaatttagattattcttcacaaagaatagtgaaaatcatgctccatcgatgatttagtgtcaagtccccggtggaccttttgctcgttgcccatcttccagtgaccatttctcctttcctaatgacttttctgagcgactattcttgccattgtcccgaaccaaacagttttagttactttttgtttttttccctcttttctctatcgcaacccctttgttgcttgaatagtatcatgactattgtgagcactggcagagctacattagaatgaggggaggggggcgcaaatgcaccccctcattttaataaaatcactagtatttattctaaaatattatattttgcacactctaattttatgtatttgaacctccttaccagttcacatgtgagagtaagtaaatgcacaattttattttaataaaatacaaatatttatcttaaaattttatattttgtacctcttatcttcgtgtttaaatctaattattctatatgataataatagttatcaatttttatttttttaaataaattgatcccactgacccagagtcctagatccgcccattgattgtgagcactattacattgccactatgttgcctttttgtcgatgtgcctagatgatcgaaagtgtctccctctagcgaacccaacatcgcaaatctcattgtcgtatgtcaccaccctccgatgcgagacactcacgcgcctgcaccgaatcaacatgtgatgttgttttttgaatgacccatcctccgatgacctccccatcgtgcttcttcttttctagaaaaacctatttttgcttcatttggctcgatttgcatttgtttggttgctttggctattgtatctaccatcctagctagtagttggccaaatagccatgtgacacattttccagcgtgacctacgttcagtgaccatgtcatcattctcatcttcttccgacaaccctatttcgttgctgtttgactctgttttgtcgttgtttggttgacccacaatccagcgatcgcatcatcgcactttgtctctttccagcgacctagtcaaagaccaccatgccatccacgtgcatagccaactcaaaacaccacaacatgcgccccacatagggtcttggtgcgtgatgatcatgcacacgacacataacacatctccaacaagcatcacagtggtcttcgtcatcattgcgagcctttgttggctgccatcgaatcatgtttatccgatacaagcacactacttgaattacctttaatttttatcgaattgaccacatttataacaagctcgagcttaagggagattacatatcattctgttatttgtgattagataataattagtgatttagtctttattagtcattattagatttatcttatataatcaatactgatcatatttatttattataaataaaggtttaatgtaatcatccttaacacaacattacagtaatactgtcatatgaaaaatattgatatatccttattaatatatgttttttttttatcaaatgaatcagtttgatgataaaaaagacaaaaaagaaaaacacaaacataaatgtacacacctcatccttaccaaggacaaaaatttcaaaggaggaacgcaccttctcccaattaattaaattaaatcttgctcacaaatcaactccataaaaccacctaaaaaaactccattgttgctcgttgtccctatcttgtcgctgacaaccacaacttcaaaggatggtttgattgtgtgggggagaggttactatttaagggaaaaaaattaaaaaatagtgcgtctgacatttattttttattttaattcaaatattttttttccgtttctctttcattcttttctcttctatacaaacaaacctaccccaagggatacaagtacacaaggcaaaataatcctagaaatattttctctacaaagaaaaagctagacagggctctaactatagtgacaactacgttaggtgtgagttctgatcacttttccttagtgattgattttattccaaaaatgagaagtgataaaaaaaagtacaatttaaatatatagtctcagttaatataccaaaatttagatttagttattcaaaataacttttgttggatttgatttttatatattttttaaatggtcgctaacattatttagtgattgcaggacatgtatgaagacatgttacctcggtgactattttttgacatgttatgccaatgtcattaataaatgataatagagaccattttaaattttaaaaatttatatgaattaaaaccaataaaaaattgaaggattaaaacaagaattcacagtatttatacataataacagtatattttaccaaaacttaaatacgaggcattatgggaaaagtacaagcattgtggaaccttagtgaaaaaaggatagagacaagggaagggtaaggaagatgctgggaaatagttaactgaaaaattaaaaaatctgcaaaaataccttactacagcggcacataaagacttcaattttttcaaatgcaaatctatagatttctagactctaacaaagactaacagttctttgaaatgacccccataataataaaacttgtgaggaaatggaaagtaatcaaaggaggactatggaagtagaactactgtgtgtaaagatttagattgaaatgactgaaatggggagataataacaagagtttatttcatgctactacaatccaaagatataggatatgcttagacaaattgaaaggtgacagtaaggcatggttggaaggttaatattacagacttatgaatgtaatcactttagacacattagtccccataattttaatgttcaaggtattgtaaagattattgtgttactgttaagtttagggttctataacataattgatttctccatatctgagtacctttgtaggagccagattaattaaagacaaaatagtcatagcacatgaggactttcatgctttgaagagaaggagcaaagaaggcacaaaaagaatagccctaaagcttgacgtgagtaaagcctatgagaaattagaatggactttcttggagaaggctctaatagcatatgggtctggggataaatgggctaagttagttatggccttattgtctagtataacatatacagtctaaatgtgttccaaagtcctacagaggcctcaagcccatttattattcttgcctcaaatactctctctcaaatattttagaaagaataaatcattaatttcgtttttaaagtattactgtctcccttaaattatccataaatcaagaaaaccatttaaataatccttaaagtattgaataaccataacttttaatttaagttaatgtatttttaacaaagtttaagaactattttgaaggtattttttaatatttggagaactacttaacacaactttttatacttttgggatcacctgagtagttgtttttttttataaaaaaaatagagagtatttagaagagagtaatatttgaaggatgaattgattattaagaaagctcttacatatggagatttattgtgaaccccttctagcccaactctttcctacgtaccttctatttgaagattatgctcttatctttgggattacttgtgctggagaagctgtccatatttttaacctgtcctgggtcaaaggattaacttagcaaagtctggattaatctttggcaaatatattctactgctactaataaaagagatatctattattagtgtcttaggaaaagaagcttgggaaattgttggtaattatcttggtctcccaacagaatggggcagatctagaaatatcactcttcagtggattagggagaagaggtaactctaatcaaagtcgtctttcaaagggattccctcttatgcaatgcctgttatacactttcctaagtctttttgtacctttctaatttcctcagtagctaggttctgatggaggaataagggtaggaaaaggattgcactagaatagttggcaaatattgtcctttggtagcattactaatctagcaaagtagaattggcgggcttatagagacccaaattcattatttttgtttcatgggtttgacacagtattcttcaaggcaaggagtttgttaagtagggtcattgaaccataataaacgagaataaggtaggtattaaatgatagtagatgaattagagccattcgaccccattctaagtttggattatttagttaagagaagctatcatgttgctaaacaaatatcatgtgaagtgagaagatcaatgagctcctcttcataattaaggcaccccatataaggttagacattttctagggaaggtcttccataatgcttttttggtcataacaaacattttcgctatgaagcatggctgtctatctactatgtatgttgtcccatctggtgcaagagacaaatcagcatactctgttactctgtccctagacctaactagtttgatttaggacacaaatacaatgctatttttattttacgtgtcaaagattaatcaagtacattctatatcccttatgttgtggtactggtatatttggaaagcaagaaacaaattgatcaatcaaaacaatactcataatcctaccatttagtttacatttaatcgttgcaatcattaaaacaatagaatatatgaaaacttttttttattattnnnnnnnnnnnnnnnnnnnnnnnnnnnnnnnnnnnnnnnnnnnnnnnnnnnnnnnnnnnnnnnnnnnnnnnnnnnnnnnnnnnnnnnnnnnnnnnnnnnnnnnnnnnnnnnnnnnnnnnnnnnnnnnnnnnnnnnnnnnnnnnnnnnnnnnnnnnnnnnnnnnnnnnnnnnnnnnnnnnnnnnnnnnnnnnnnnnnnnnnnnnnnnnnnnnnnnnnnnnnnnnnnnnnnnnnnnnnnnnnnnnnnnnnnnnnnnnnnnnnnnnnnnnnnnnnnnnnnnnnnnnnnnnnnnnnnnnnnnnnnnnnnnnnnnnnnnnnnnnnnnnnnnnnnnnnnnnnnnnnnnnnnnnnnnnnnnnnnnnnnnnnnnnnnnnnnnnnnnnnnnnnnnnnnnnnnnnnnnnnnnnnnnnnnnnnnnnnnnnnnnnnnnnnnnnnnnnnnnnnnnnnnnnnnnnnnnnnnnnnnnnnnnnnnnnnnnnnnnnnnnnnnnnnnnnnnnnnnnnnnnnnnnnnnnnnnnnnnnnnnnnnnnnnnnnnnnnnnnnnnnnnnnnnnnnnnnnnnnnnnnnnnnnnnnnnnnnnnnnnnnnnnnnnnnnnnnnnnnnnnnnnnnnnnnnnnnnnnnnnnnnnnnnnnnnnnnnnnnnnnatattgggtctcactaaaataattgttcaaatttattcaaaaatatgttgaaaacatcctgttggtaatatttgactttttgttcctcctacagtggcatgtagtttatatttagagaactaaattaaacacggaatctgtcgtgaaagaagttgatacttgataggttgactgtactataatgctactagaattgtgcacaatagataactttattatttctttaagtatttctcctttttttttttatcagttatgtatttctgatttaaaattttaaaaaaagaggtcttaatcagtgtatttgcatttaataattttttggcatggatattcgaaacagacaataaaggtaaaaaattgattgggaaaaaaataaaactcgtttaaaattgaaatgagctacaaaaagcgtacactagacgtaggttgtattaaattaatcttatggagatcaaagctgaaaattgatagggactactacatactgggtgtttctgtttccccttcccttctcacattatcacacgtcattagatactatacattgatctagtctataattattagatgacacgaagttggtgaatgtctatgtcaatttcccaccccacaacatgattgaataatttagacccttcttacagagttctggtaataaaagtctcgttatttttaagatttataaatgcttgtcgttctaaattggaccaacaaacaattatttgaggctaatcgagtttataccacatttattagaaattctcaactcatatagctttacacaaacgagtaactcatttcaannnnnnnnnnnnnnnnnnnnnnnnnnnnnnnnnnnnnnnnnnnnnnnnnnnnnnnnnnnnnnnnnnnnnnnnnnnnnnnnnnnnnnnnnnnnnnnnnnnnnnnnnnnnnnnnnnnnnnnnnnnnnnnnnnnnnnnnnnnnnnnnnnnnnnnnnnnnnnnnnnnnnnnnnnnnnnnnnnnnnnnnnnnnnnnnnnnnnnnnnnnnnnnnnnnnnnnnnnnnnnnnnnnnnnnnnnnnnnnnnnnnnnnnnnnnnnnnnnnnnnnnnnnnnnnnnnnnnnnnnnnnnnnnnnnnnnnnnnnnnnnnnnnnnnnnnnnnnnnnnnnnnnnnnnnnnnnnnnnnnnnnnnnnnnnnnnnnnnnnnnnnnnnnnnnnnnnnnnnnnnnnnnnnnnnnnnnnnnnnnnnnnnnnnnnnnnnnnnnnnnnnnnnnnnnnnnnnnnnnnnnnnnnnnnnnnnnnnnnnnnnnnnnnnnnnnnnnnnnnnnnnnnnnnnnnnnnnnnnnnnnnnnnnnnnnnnnnnnnnnnnnnnnnnnnnnnnnnnnnnnnnnnnnactgagaaaattgcacagtctatgtatattacaactttgtggaagttgtataactaatattattttccgactcgtgtaagggttattcaattttgtcatggactttgatttcacttaatactatactacatccgatcctttttactaaaaacaacaaaaaagtaatagtctaaaatatattatcacttgtttcttgtaaaaaatacggtaggtaatagcacccaaatggggaaaaaatagcattaaaaacatagaaaaaaaatgattcacgcatcaatgatgtagagagtaataatttttatatacttctgttttctaacaactccttctccaccttctttttctatgtataattgtatctgttgttttcgctcatcacatttcttattttctatcccatcacttcttatcactctcacagaatctttattcattacagagtaataaaggaatagggaagtagaccaaggcttggacagttggacttgtgcacagggaaaacaaaggggaaaagaaaacaaaaactcacagaaaatcacagtcaaagtaaaatagaaaaacacttatatccttcaaaatgttttatggctctataattatgattcaccattaagtttgtatggatgctcaaaaccacacatctgatcccatgaatttgttataacagaaggagaatgaaaccagttatgattgccacaaccaatttgattcattgttttcatggtaaatggctaaacaattcttttatataccccaagcatatgaacacaacatccattcctaaataacctctaactacaaaccccactatacatcccaaatgtaaaagagctactatcatgtttggataacacataagaataaattctaccccatataatcaggtgataccataaaaaaagtagaagaaactatttgttgtttttacctacaccatgaaaaattaattgattatgttttaccataaagctacatcactactcaagagacccctttatagtgattcaaggaaaccagtttttgagagtacagcatttctcactttgctaagatccctacctttgagggttctcccagcaccttctaaaacagaaaatgaggatatctgactccttgcaagccttctggcaataaactcatgtggaggaagcttatcactgtcatcattttcctctccatcctcatcactactcccaccatagttagcaacaccatcatcatcaccatcataatcaccatcaaaccttgaactagcactattcttggggggtttagtgctataaatctttgaccagtcaggaatgttgacaggtgctgattgctgaagaaccttatcttcattggaggaactagcactgctgctattgctagatcttgggatcattctggctgaactaggcctagcaggaacaggaacaggaacagaagagggttgatctttgtctttgaacttgcgaaccccagaagtaccataatcactacttctgttcttgaaaacatcccaaacttcttcttcatcaaagtctccatctctcaaggacttccatatcccactatgctgcctgcctagactatatttatcttccatcacaaatcaatcacttcctgcatagtcacataacacaaatgtgaagaaaattatctcaaattattgaactagaattttcactggtttaagcaaaagacaagaaggagaatttggaaattaaggggagaaattaagaaccaaaactataaatcacacggggtgattatatttgatacaataagatatttggtattttattgaggaaaaataaaaggaaccacctttatgttgttgttgttgttgtcctggaatcagaagcttgaaataacccaactttatattgattctaaagtggtttcttgctggaatatgcaaagaaaaaatgagttgtgaaatgagagatgagtcagcttggattaattctgataccataagaacttgaatttgactgaatatatatgacggtgagtcaaaatccataatattatggcttacctgaacaagtttgcagagagattataggagaaacagcaaagcaaagagagagcaagttcgttctttctgaaggggaaagaatgagacactgaatgataggtgtccacgtatttaactctggtacctcacaggattaacgttttacaacgtagtacatgtacatgcccactatcttttttattttcaacacctctgttctgagttctgaccgtctaaactttaaataattcaattagcaccttttatttttatttatatcgcatttattactaataactcatattatcaattcgagttaatgttgatgcacgaataatttaattcattactgtcatttaattataaattattatttaaattagtttaagataattattttaaaaattatcaaatttatcataaaattattattagatgattatatattttttttctttccatgagtccaccaagatttttgtttttattttttatttttttcacctactcattcacaaccatttccatataagtgatgattaattgagtttagtatacagtccaaaaaaaaattgagttgagtatatgttgtgaatctctaatgnnnnnnnnnnnnnnnnnnnnnnnnnnnnnnnnnnnnnnnnnnnnnnnnnnnnnnnnnnnnnnnnnnnnnnnnnnnnnnnnnnnnnnnnnnnnnnnnnnnnnnnnnnnnnnnnnnnnnnnnnnnnnnnnnnnnnnnnnnnnnnnnnnnnnnnnnnnnnnnnnnnnnnnnnnnnnnnnnnnnnnnnnnnnnnnnnnnnnnnnnnnnnnnnnnnnnnnnnnnnnnnnnnnnnnnnnnnnnnnnnnnnnnnnnnnnnnnnnnnnnnnnnnnnnnnnnnnnnnnnnnnnnnnnnnnnnnnnnnnnnnnnnnnnnnnnnnnnnnnnnnnnnnnnnnnnnnnnnnnnnnnnnnnnnnnnnnnnnnnnnnnnnnnnnnnnnnnnnnnnnnnnnnnnnnnnnnnnnnnnnnnnnnnnnnnnnnnnnnnnnnnnnnnnnnnnnnnnnnnnnnnnnnnnnnnnnnnnnnnnnnnnnnnnnnnnnnnnnnnnnnnnnnnnnnnnnnnnnnnnnnnnnnnnnnnnnnnnnnnnnnnnnnnnnnnnnnnnnnnnnnnnnnnnnnnnnnnnnnnnnnnnnnnnnnnnnnnnnnnnnnnnnnnnnnnnnnnnnnnnnnnnnnnnnnnnnnnnnnnnnnnnnnnnnnnnnnnnnnnnnnnnnnnnnnnnnnnnnnnnnnnnnnnnnnnnnnnnnnnnnnnnnnnnnnnnnnnnnnnnnnnnnnnnnnnnnnnnnnnnnnnnnnnnnnnnnnnnnnnnnnnnnnnnnnnnnnnnnnnnnnnnnnnnnnnnnnnnnnnnnnnnnnnnnnnnnnnnnnnnnnnnnnnnnnnnnnnnnnnnnnnnnnnnnnnnnnnnnnnnnnnnnnnnnnnnnnnnnnnnnnnnnnnnnnnnnnnnnnnnnnnnnnnnnnnnnnnnnnnnnnnnnnnnnnnnnnnnnnnnnnnnnnnnnnnnnnnnnnnnnnnnnnnnnnnnnnnnnnnnnnnnnnnnnnnnnnnnnnnnnnnnnnnnnnnnnnnnnnnnnnnnnnnnnnnnnnnnnnnnnnnnnnnnnnnnnnnnnnnnnnnnnnnnnnnnnnnnnnnnnnnnnnnnnnnnnnnnnnnnnnnnnnnnnnnnnnnnnnnnnnnnnnnnnnnnnnnnnnnnnnnnnnnnnnnnnnnnnnnnnnnnnnnnnnnnnnnnnnnnnnnnnnnnnnnnnttcttaatgtaaaattaattataagaaaattaatatctaaaaaatatactaaatacattaattttttagaacaaaataaatttataaatatattatattaataaacttaactgatattaaaattagatgctatatttgttaaatacaagcataattagcttcaataatacattgactataacatacacattcatctattataatatattatgttgattaatgaattttcatattgataaatgtttttttataaaattattatcataattgaaaattaagaatttcatacctgaaaatatagtttcaagaaacttattattttcattattatttggagcatattataatgtataaacttgttgaaataaaaggtaataaaatgcttaatcttataatacaaaaaattaatgaatatataatatattttttttgaagaaaattcataaattttgagaaattaactataaatataataaattaaaataaaatatttaaattcaataagatggaagtcaacaaatacatattaaactaataatacgagaaaacataaaaatattgtaatatatgatattaatactgttattatnnnnnnnnnnnnnnnnnnnnnnnnnnnnnnnnnnnnnnnnnnnnnnnnnnnnnnnnnnnnnnnnnnnnnnnnnnnnnnnnnnnnnnnnnnnnnnnnnnnnnnnnnnnnnnnnnnnnnnnnnnnnnnnnnnnnnnnnnnnnnnnnnnnnnnnnnnnnnnnnnnnnnnnnnnnnnnnnnnnnnnnnnnnnnnnnnnnnnnnnnnnnnnnnnnnnnnnnnaatttaaattaaactattaaaggacatgataattaattatgacatgtttctaagctatatactttttcatgataataaataataaatatattaaaagaatattacataaaagatagttattacaaactttactcttaaaaataagatagttataataagataaatttataagcatattatataattaaaattaatttcagattaatcttaaatgttatattaattaaatgtaatacataactaacttaaatacatattatcatgcactaatttcaatatatttccccgatacatgaatttccatgttaataaatatatttaaaaattattaaaatttcatacataaaaagtatactaaaaagtattttttcattattatttataataaattaatgtttcatttgtaactactagtatattaccactaaataaagttgataatttcttttattgattttttattgaaaatttatattattatacaaaacatgttgcctacaataaaatttgttaataaattataaactaataaaaaaattattttctcaacatcttttttttatatatattttaaattgtatgtttttttctccatatttatacaaattctcacgcacctcttgagataaagaacatttaccctttcaataagtacccacaactgatgattaattttttccttcagtatttctttcattaaataattttatactatcattcaatcataaattattattttttataaaaaaaatttagtatttaatattaataaacaggctgccataacatgtgtcaaccagaaaagttatacaagcacaacatagtaagtgtgatgctgcaatcatgattcaataagaaatcacataaatattgcagccatgtattcaccatagtagatccaatcccaaaacaataaaccaagtagacccgtgctcactcatgcatacaacagcactcaggggatctattttccaaacatacaaggagaagtcgaatccttttatcatggctttacaccagttccacgccctatatccaaattcatcacaaatcaaggttgataatgatataacttaataaacgcgagttgattaaattgtggtcgtgtcatttaataaatttttagatcctcttcgggttaaaatgttgtattgaagaacatatgcttgaaaattctaaggaagactacaagaaacgatggtatatacagcccccttgaatgggtggcgaacagataaagacaggctattctcgaggaaacagacaaaagagtcgaagtttcaacaacacatgaatacaaatgttggaaattgtgtaaaaaaatacttatgatgcgcatttgacccaaattatacgaccattttttgtcttgtcttcctctttttgttttttctttaacttattttcatcttagagcatacatttttattaccatatcatcaatagggaaggatatatatgatatactgatgtttgtgattagagtgataaggttacaaatatattttttagtacatttttagtatattataggagtattttaaatttaaatgaaatttctaaattaaaaataatttcaatattatcaatatattttattttatttatgaaaataaataaaatatatagtatttttaaaatttagaataaaaatataaaaaatatgttttttatatataactttaaatttaaaaataaatttaaattacggttatagggactatgataattttaaaattccttttagtttaaaaaatatatatttaatttacaatgcatnnnnnnnnnnnnnnnnnnnnnnnnnnnnnnnnnnnnnnnnnnnnnnnnnnnnnnnnnnnnnnnnnnnnnnnnnnnnnnnnnnnnnnnnnnnnnnnnnnnnnnnnnnnnnnnnnnnnnnnnnnnnnnnnnnnnnnnnnnnnnnnnnnnnnnnnnnnnnnnnnnnnnnnnnnnnnnnnnnnnnnnnnnnnnnnnnnnnnnnnnnnnnnnnnnnnnnnnnnnnnnnnnnnnnnnnnnnnnnnnnnnnnnnnnnnnnnnnnnnnnnnnnnnnnnnnnnnnnnnnnnnnnnnnnnnnnnnnnnnnnnnnnnnnnnnnnnnnnnnnnnnnnnnnnnnnnnnnnnnnnnnnnnnnnnnnnnnnnnnnnnnnnnnnnnnnnnnnnnnnnnnnnnnnnnnnnnnnnnnnnnnnnnnnnnnnnnnnnnnnnnnnnnnnnnnnnnnnnnnnnnnnnnnnnnnnnnnnnnnnnnnnnnnnnnnnnnnnnnnnnnnnnnnnnnnnnnnnnnnnnnnnnnnnnnnnnnnnnnnnnnnnnnnnnnnnnnnnnnnnnnnnnnnnnnnnnnnnnnnnnnnnnnnnnnnnnnnnnnnnnnnnnnnnnnnnnnnnnnnnnnnnnnnnnnnnnnnnnnnnnnnnnnnnnnnnnnnnnnnnnnnnnnnnnnnnnnnnnnnnnnnnnnnnnnnnnnnnnnnnnnnnnnnnnnnnnnnnnnnnnnnnnnnnnnnnnnnnnnnnnnnnnnnnnnnnnnnnnnnnnnnnnnnnnnnnnnnnnnnnnnnnnnnnnnnnnnnnnnnnnnnnnnnnnnnnnnnnnnnnnnnnnnnnnnattaacatattaattgtgatgaaacttgatgtaaatccttaagtaagggtcttacatttatgtcttatgaataataaaaaagtaattaaaaatagatatttgttaaaaataattagtcaggttatcaatgaaaaatatatagtaattaataagtaaaaataataaatattttacatctattacataatctattacatagttatatatatatatatatatatatattccaatgagacttttaaatacgttaatttaatataaaaaataaagttgaaaggaaggtaattaacgtaaaactattagtagataaaaaatgaaaaagttaaaattctattaggagaaagaaaattagcacacggaaatgatctctgttctggcacagcatttgcgcgctttgtcaaagtttttaattctttttttttcttttctgaaaaaaactgtgtaaattgaaaccaaagggaaatggttcgtggaagtttctgatgttgaagaagatcaacgtggcccacatacacccattgccaatccaccattcaacgtatatggatatgaaattttgtcagctgggagaataactcccaggatttagtgggaatcttatgtaaagaattaatctgctatataagattttccaccgttggagcagaatctttttgctaaaagctaagccatgcacagcattgaggtggcggctgtaaagtgacagcactggtattgagtacgataatcaacacttaacacagttaactgattttagtcataattaaaaatttatatattagtaattgttatgtcacttaattatttgatctcaccttaattttttgttgttgtattaatgggaattgcaacagtgtcattaggcggtttgtaataactcaaggtttgaatatatgcaacagaaatgtaattgaaactgacggcaatatatctcacttacttagccttccctttcttaatttcctgcaaattaaagttacgttggttgtctaatgtgcatcactgatgttggatattattggattacgtgcaaatgtttaattttgtattatactatgtaatacggatacacttgacgatgtttattatatatttttctgttggcgtatattaattgagagttttatacgtgttttaatttctttctttctttctttttaggtgggtgtggggttagagctagtatctgagcactgaagtatatttacgatggtgaagaaatgcgtatattacactcaagaattaatgccatatatgccaatcaatctcatccagttttcaccaaaaatgtagtttacgcagctgacaaggtagctgtatgtcataattcattaagtagtaacgagtgaagacaaaccccacgttcagccaaaaagttttcatagataacgatatgggaatgtaggccaaaccacgtgcattaggaggctatatttgtttctagtattttttgctttcaaagttcaaacatttactgatatatggtcacaattaatctacctgcaatgtacgtgaaatatggagacagacatacataactttggcttcaattcattttaagtttatttttttatatatattctacaattgaaattagaggtgtatttaataatcattatttatctttaatgccgaatttaattatagaggttataaaagtaaaattataattttaatgaggagaacaacgacaaaaagtatttccaattaagttctatcctatttgttttttattggctcaaagctaggaaacacgtgtctcttacaaaccttcaggttgaaagtacgttgaagggttggtgccctttataggtgatctttttagttaggtatgatgagagcaaggtcacaactgtaaatgcctctaatgctttaagtcaataagagtaagagttaagacgtggttagtgtttaaggcgtacttggtatatgatgctaattaagtcttctttataggcctttttcttagtgttcatatatatgacaagagattagatgagataacatgataatttgttacctattatggaatttaattatcattaagcgagatgataagaggttaactattaacatgtaatatgttatctattggtgttaaagagacaattaagtgtatcaatcgtacgtacaactaatatatatactagaatgtatgagtacatctttgtttgagaaattaaaaaaggaagtaattacattttagtttttggtattcaataaaaattagagaagaacagacacaaatgaacaactaagaaaaaaaaattcaataggcaagaatggtaggtattagaaatgctaggtatggggttgtagaaaccactggggtcgagctctaacttggcttccctttggcgcaaaattcatcagcatgggcaccattgtagtgattggcgtggtggcatcatgtgtagctaaccacgatatataccaagtgtgacatttttcgttgttggtttatcttgcaagtcttagccttttttttttttttttaggtgttgtcatcttttatcttttatgatacataaacactcattattttaaacattttatttatatctcttatttttctttatctctctcttcctaccaaataaactctagatatataccatatctatattttttctctttttactttcaattactaggtgttgcatagcattatggtgtccatctaacatttttaaaacctaaataattaagtgaaatcatgcaaattttgaacttagaatctcagaaatgtgaatcacatgaaaattgatacacttaggttattttctcataaaatttcattaagttaatgccatttttttgttatttgttttgcaaaaggacaataatttttctatattcaataatttttacacattaaattttatcaattcaaccgttaaattaaaattgcttataatatataattaaataagttatttttctatataaaatcttaaatttattagatacatcattaaataaatttaactaaatgcataatatatttttaaaaacataagtaaaatattgactatgacattacataataaaaaaatagttcacttatttaaaatttgatttgcatgatcttaaaatttgggtttggatataacttagacctcacaaaacttgcttatcccattaaatattttaatttgatcatgtaattagttaatatgtgttctcaaacatatacaatgtctcatatcgaggactaaccatctcatcttagacataaaatttgtaaaactgaacatttactagtagtttgataattaatgatctaatagtggttgtttgataagcataataacacttattaggatagattttgataacatttataaaatgtgagattgtgtttaacttaaatctacaaaactaacttataaaagtaaaatttgctcctacttatatattttattttagccatatattttagccgtgcatatgctgggcctgggccttattttcgatgggagggttgatttttctttgacaaatgctatatcagtaacatttttctctaagtacactccgcttttattttaattaaatttttttactatcattagtcctctctatacccaaaatattcctatatgctgtttaatcattactcgggaaattaatttccagaatactattttagtttttttgtttcagaaagtacatttcaaaatgcaatttgatatcatgtaacatacaaaatacaaaaaatacatgaaatagaataatgcaatttgatagaaaaatagaatgagtgggaaggttgtgcagaagcgcttgttgatatattttgggccagatttaaaaaaaaaaaagatgttttaggccttgggccaaactagtacacaaattagtttcactactgaattgtcccacagatgagtaattaaaccggtggtgaaaacatgcgtagaaaatcaagtgtatgttcaagacaatttttttttatcaacaaatattaatttgttaatttagttagaaatactaattgggagaatgcgagaaattaggcatggcaacgggacccgaacccgtgcgtacccgtccgaatccgccccgattttaatggggaaaaaccgaattttttgggttcgggttcgggttttccccgatagtcaaaagcgggggcgggggcgggtatggggttactgatacccgcccccgcccccgcccccgctccccgccccgtaataaaaaaataaaaaaaatactattttctaattttttttaattgaattgattgattttgttttgtaattttaaaattatgatcccatattttaaatatgagtttgttattattatttttttgttacataattaacttttttatctgatttttcaataaaaaaaattatattattttttttattttttaaattttaatcaaatagcgggggcggggcggggcggggaaaacccgacccccagcgggggcggggatggggatgggttttaaaacccgacggggaatgagggcgggggcggggagcgggtttgggggcggggacggggacggggaatgcaatacccgcccccgccccgccccgttgccatacctacgagaaatgttagtttgttgtatacccttctatattccaaaatgccccttcgcaatggacaaagcattgtttggcctagttaatgcatcattcctggttttatttgaatgaagtccatttgttgaagtttcctatgcaaataaataccacataatatgatcttgtgcatactttatagaggtacaactgtaaaagggtgctggtctggacaccattatcttgactctcaagattgggctgccaagggtcctttactactcgtgagctcaccaatgacaaaatgttatttcattatatttgtaagtttaatttttatacattatcagcgtaaattggtactaattttatggtaggtatagaaaaagttaacaaaaatttaatatatatcataatttgtaatagatgacagtaaaactctatagtctcactatttgagtgtatttattggactgctttcttgttttacaaatattttttcacttgcttgttcacatagggggtgaaaggagttattgcaagagctttgagagaattcaccgtggtaatctagttgggatggggatcatacccctctgcttcaaacatgaagaacacaagaactgacgggtcatgagtgattcaactttgatcttccaggaaaagttggtgacacagaacctggtcaagatgtttatgtgtccactgacattaattggcaaatcttttaaatgcaagctttgccttgatataagtttcttaattcatgtgccttctatatatggtttatcatctaagattgatcaatgcacttgcacacagtggcttcactaatcactatgatatatacttatttagcaactcaatttgcaggtggagctggcataccttgatcatagtggcattcttccctatgttatccgaaacttgattaagcaatgagcttttgtctctttggatttctgaggcacaccatcaccatgtgaaatgtgtggaacacaataaattccattttagattattttacgcatggatctgaatgcacttaatggcaaatcaatatgtttatgcaatgtttaattttcatgtattttatctattttatttaacacttcactgtactacaaaactgttaatctcaattatcatattacagtcaatccattgtttttattttttactaacttgagcgtgagacataaaactaaaaagatatattaatttttttaaaaaattaataaaaatgaagaggttaattattgtttgaatttatgatctattattttaaataataaataaaaaaccgaggcatgttgcaataacgtacagtaattaatataaacgagtatggatttaattaattaactttagctccaaaacattaactgtataaaatattattatcaaattattaatgataatcataaaaaactaagcctatcaccaactattgtgatatttcacttgcttttatagcagcctttcacgtactgatcattactttttaattattatcaccccaatataaatcttacaattttgttttataatatttctgatgaactaaaaaatattaacttaaaaaaattaataacaaacatcataaagttgtttgaaaagccaaaaatactcgttataaagaaaagaaaaaaaaaacacgaatttgtttgcatttttattatttagaaaaatgaattcttatttcctttaactcatttatctttaaataaaatccaactaattatatttatttcgaacatatatatatatatatatatatatatatatatatatattgttggcaaaaacaaattaagctgagaaatgaaagggaagagaggaagcaagtgtgacactgttccccaattttctgtgcttagagtgaagcatttcgaaacagcaagacacgatgccttcggctcaagatccattctacgttgtcaagcaagaaattcaagaatctgtaagtattttctcttttcccaaatcacctaggtttcgttttcggttcaatttggataataaagattacattcttttttttcatagatcatgcgatgcacttagaatttctgtatgatttctctgttactggtattagtggatccgtgactttacgtgattcatcttctcaagcctgattcctgagctgaaattattaattgggatatttttgctcctaatatcttatgtaattgatctgagtatgccattttttaatgcaaattttggattttggatagaacccaactgcgatctgtaattggaggataacactatgatttttggttttggggttgatgtgtaatttattggcttattaattttcattttctggtaagattgataagctgcaatctacgtttcaccaatgggaaaagactgctgatgctggcgagcgatccaatctatcaaaggaagttcttgctagttgtgaaagcattgaatggcaggtataccaattgtatttttttgaaccactgacaagttggttggcctataaatttttgttttaaatgagttttattcattcttccaacgtggtactagtatcatttgtatgaaatgggatttgtgtattattaggtacacgttagagggatgtttggattatattacaatctaggtcagaggtagggaaaggtatttcctgggggaaattttattgtggtaggaaggaaaaagagtgatgtgcacataactgtccaaaatgattctgacatatgctgcaatttttgtcaaatacatggtatttttttttatcacaaaaaagcagaagaatcattcactctgtgatcattgtgaggatgcaaatctttgtaaatttcagctaaatatcattgttaaattttaatgttaattagttaatataagagcttaataaatagtgaaatgcattatattcatgtatttttattcatcattccgttccctccccccccattgtattttttagccacccaataaagggagagcaagatcatcaataccctctcccttttttccctcttgttttcttttaatttgattttgccccttccctttgggtctgtaaggaaagatgaaggggagtaaaaatggagtgagctggaaatgttttgattttcactctttgttggttgttaaatcagagagtggaaaacagatagaaagttacttctaactctactagcacatcttttatctagcctctctttgccacacatcttaggctatggtttttccttctgcaatacaacctattcaaactgctaaaatataatttttttgataggaaggtggatgaattggacaaagcaatttctgtagcctctagagatccttcttggtatggcattgatgaagtggaggttgaaaaccggaggacgtggacccgtgatgctcgcacccaggtatctataacatgctgatcttgagtaagagttaggagaatacagtcaaattttttctcaacctaatgtatagttcattcaacattgttttattgctagcacctattagattccctctctctctgtttttttttttatctgtatggtgcttgtgaatgattgtaatacattattaggtgagcacagcaaagaaagcagtgcaagctggaaagggcttaaacaatgctagtctaaatgggatgcacaaggaattaatgaggcttcctagttctcatcaaactacatctaaccaatttgctgcccaggataatgatgatttcatagagtcagaatcggacaggcagatgcttcttataaagtacttctttcctcccattttctctctctcactttatatggcattgaattaaatatttgtcttttgtcctgcttttacttgactttgtgcacatcttcatgatattaaactcattgacacttgaccgtgacttttgtgcatgcaaggtggaaaatattctcgtaattagtttgacctcttaagttgattgaattatattgtccactcctcctctatgctttctgagacgtaagtgggctcctctgtatgaaattgtggacacatgaacatatttttcttgtgcttctttacaaattataaatttctgttttttaatatcatctttgctaattatttaagttttgtttggattatactatttctattaaataagaaatattaactaaaatgatggattcccctttttttctgtggaagaataagaaaatgggggagagtaaagactgtggcaggtagccttaacacagataaaggctggaaatacagtgctcaagtgttttcggaaaataatcaatctctggtttctattttatttttgtcttatattttatctattggtgctgataggagacaagatgaggagttggatgagcttagtttaagtgtacaaagaataggaggtgttggacttactatacatgaagagctccttgcgcaggtagatttgacatttgacaagtttttggtctgtgatcttactattttgcttagtgggagagccttgttgctgtcttgtgagttggatgttactggtgtaaatactggaaacagcctctccccttgcggggttaaggcatttttactcgtgtttcaaaagtatgaaactaggcaaaactggtggtgcttatgtttcctttgagtgtcttcaatagtagctgtgttctcatgctgattttgtttccgtgggaaatttctcattctaaaattgtcaaagccttgatgtttcaggaaaagattattgatgaactgggtaatgagatggacattacttctaatcgcctagattttgtccaagtgagtttctgcttcgagtttccattattgcattaaaatgtatgatctatctggctgattgctgtgattaattagtaataatataaggagggcgagccctgacacaacggtaaagttgtgttttggtgacttgttgatcatgggttcgaatccggaaatagtctctttgcatatgcaagggtaaaactgcgtacaatatcccttttccttacctttgcatagcgaggagtctctggacaatggaatacgtagttttttttttttttttttttttttaatataaggagggaaatttttaatgttgaatgtgaaagttgaactgtgtctcattgtttatgatatcagaaaaaagtggcaatggtcatgaagaaggctagtgcaaagggacagatcatgatgatattgggtttgttggtgctgttcattttcctctttatcttggttttcttcacctagttattgagatgaaccttgtcaatgctctgtttgtacatggaaaaagatctaaagcttctgtgaagatacaagattattgggagattcaatatgtttaaaaaatgaatggaagcctctttggtttgtcaaaggcagtagaaaattttgattatgatgaaaagagaagcgatgtacttggaaatatcagaagaggaatttgtttctgaacaagatggattacaaatgtgatttaaattagttgtattcgttttaaagatgatttaaccctgcatgtaatgtttgatgtcgtttttttttctttttataacgacagcgtggtgttttgaatttatactttcatgactgtaccaaaatagcttatgatctatcttcatacaaatcaacccattatttacctgctcactcctggtggcatgatgatcttgtcggttgctgttttgtgttggcacagtagaatattgaggggaggataacatgttatctaatttggccagatatttcaaggtgtaatttttatgcaattgataaaaaatgaaaaatgaaggctgttgtattagtcattttgtgtctgttcagtattggtttgcttaagagtggtagggtgaaaaataaggtaatcatagccttctttgaataaaagaaaaagtaaaaataaaagggaaattggatatgtatatatgttatgcttggaaaaatcctttttttttttatttataaaaataactgagaaagataagaaggaaaacaagaatataataaaatcgataatgtgataaaaaaaaattaaaagataaagaaacgacttaaatgatttcctctaagtctaggttaccaaggtattatgtgagcgtcgcttgtctgagttccgagtttacatagtgccggttgttggagttttcaacgctccagtaactaagaaatgtcaaaataaatattaaaaaaatagttttcttataattttttttaattttattatttattttgtaaggcaaatattgtttttttttatatttctaaaatattaaatgtttttacatttttatttaattctttacagtattaagaagatttgtaagaagatctataagaagatataatgttattttgttggaaatgttttgtaaaaaaaaatactggaatttgtagagaaattgagagattaaaattcaagaaataaaattgcaattaaatttcataaaaagaattcatgtgtataggcttaaaatcaacatcttcctcaaaaatctgatatgttaattttgttaaaggtttaaatatgttttatccataataaatacttaaaatttgtatttgctttttaagaaatttttattttgtgtcgagtttctaataaaataataattttgtttgagtatctgataaatgaaaaaaaattattaggaacttaaaaaaatgtcaatgaccaaaaaaaattgttattttattagagagttaaagtaaaataaaaatctattagaaataaaatgtaaaatttaaannnnnnnnnnnnnnnnnnnnnnnnnnnnnnnnnnnnnnnnnnnnnnnnnnnnnnnnnnnnnnnnnnnnnnnnnnnnnnnnnnnnnnnnnnnnnnnnnnnnnnnnnnnnnnnnnnnnnnnnnnnnnnnnnnnnnnnnnnnnnnnnnnnnnnnnnnnnnnnnnnnnnnnnnnnnnnnnnnnnnnnnnnnnnnnnnnnnnnnnnnnnnnnnnnnnnnnnnnnnnnnnnnnnnnnnnnnnnnnnnnnnnnnnnnnnnnnnnnnnnnnnnnnnnnnnnnnnnnnnnnnnnnnnnnnnnnnnnnnnnnnnnnnnnnnnnnaattggactggaataaattttgtttttcttttgtaaaaggatttgaaacaattattttttgtcccgatctttcttttgatcttctacagacaaatattataaaataatgcaaattgagaagtgataaaaattaaaagaattcgtatctgtaacactcagacaagcataaggaacagaatctccaaagcaatttgagtctagattcttctttcctttgttcttgttctctactacaactactatataccacacaaattatcttgcgtttctatgccttaaattacaaccagatatcaatcccatggagaataggatactgcatccacccaaaaacaccttatattctgctattaaccatcattagacccattgcaatctgtgagaaattgtcacattgtaagaattttttatttattttcagacatgtaaatcaatatttaacatctgtaaacttatatcaatatataatatatacacacatttaaaaaattactttatactatcaaatgtttaattgcatggtgtaaataatttgtcctaaaaaatttcactgctattaaattgcttattctgtcacgcacacccccctactatatatacccccaccactacctattcttctcaattcgctcttgctttgtttacaagtcctcctttctcacaggttcgtctctccttcaacattagatcttcctagcacatttttaattcctacttggtctaaaaaattgtgtttgtgaaagtttgagttccaagtttaatgtctctattacacaagaaagacattttattctcttttttttgctactttccttacgaattatatgtacttgcaagatgtgaaggaaagatttgattttaatccataaggttgacataactgtgtaataatgcaccattgcgttcatatatgagagaagatgtatttaatgaaaaaatttgtatttgatttcttctttgtgcaaatttttttgaatcaaaagcagtcacgcacctcgagtgagattagtttctaaacttaatgaattgagaggcattcatgatctctgacacaaaacaataaaaccgcgtgaaggaaagaaatgcttaataggaggctttagatttgttatggttagatatgttgatattggcatgcatgcatgaacatgtcacatgtggcttatggtgttgtacattttgttgcagctagggtggtgattagtgtacatatatatatatggttgaagtgggtatttatcacatccctacgagcactttcgacccatttgcggaggcaaaagaaacagatgcccccggggcaaaagagtatgtgcatatccgcatacaacagaggaatgggaagaagagtctgaccacagtgcaagggctgaagaaagagttcagctacgagaagatcctcaaagacctcaagaaagagttttgctgcaatggcaatgttgtgcatgacaaggagcttggcaagattatccaactccaaggtgatcagcgcaagaacgtttctcacttcctcattcatgctcgccttgttaggaaggatcagatcaagattcatggtttctaaccaactaccactaccacctttcttgtattatgaaattaaacctatggctgcgtttatgaaataactaaggagtttgagtttggaatatttggtcattttctctctgtatgattgaaaatccaagaatagtctgagagttgttatatatattattactacatgttgtgctttcatggaccatgttttaagctatttttatctgattttaatttttaagagtatcagtttaacaattctaaatttataagaccactataaattcgaacaaaataagttgttatatatgtgctaatatatatgaaataatgcgttgcctgcccttcaagaatcacttttaattttaagattagaaaagaaaagaatataaacaagaaccaaggctatttacttgcatgtgtgagacatttctcttgcctcgtaatcattagttctttgatgcaaggttgccttttttgagataagaaaaaaactttaatacaatggtttttgtacatttggtctacttaacacttgatcgcatgtgttaacaagattttatagttattatgacaaaggaaaatgtgtgggagatactttgatgttttaatatgcacaaatccgtgaatacatgcatgtatgataaaattgtcttatatatgattaaataataatttatgaaattttacattattttcaatgttattaaaattgattcgaaccgaccggttgaaccggttgaactaggaacctagtatcaatcgggccgagttggctaatgaaccggccatgcatatggcccaaagaaaaccatacggttttaggaagaaccgaaaatctggccgatttttaggacccagaccgagttggtgaagaaaaaaaaaagcttcagacgcataaaacgcaaaaaaaagcttcaacttttcttcatcttcaattcttcatttgttcacggcttagctcagggcctcaggcactcatgctcattgcagcagggcatgccatctccgtcattactagcgtgtgtgggtgcaacacagtgtagagattgacatggaggaagtgagaatgacttcggacggagcaacgttgatggcgacgaataagaggaaaccgtcgtggagggatagagagaacaacctccaaatgtagagatgatcgaagagaagattatatatatatatatatatatatattgagagtttagttttttttagttgggcttgactagatgttgcttcttgtatcccatttattattttatgcaatttttattttgcattgcgaattaacttattgttattttggatttttgagtatgaaattatggatgaacttttcttaatcaaataatattagttatatacatatatataatataattttaatttttttaatatagaccggctcaaaccaggccaattactggtccaccggttggatcactgacctactatctcaactaggtcaatagtcggaccgatttttataacattgattattttctttcgccgagtttatgttaattatctcttctttcgacctatcttttgattataattaaatcgaatattacaaaatacttaaatttgttcatcgatccaaattattttaattagagtttctccatatcaattacatgccaacatattttacatgatatcaagagatcctctccaataagttaaatgtatgttttcaaggtctaggcatgttcatttatttgcaacaaattaaagtaactttgaaatctcttttattagttacttgatacattttacaaataagacaacctagctcttacaatttcaaatgactagagtaatcaaataggccgtgtgatttgatataccgagttgcactactctttaattaaacaatacccaataataacaggagatgggagacaccttaataacacgtcattctcactcacagatgattatgctcctttaaggccacaagcatcaaggaagcaatagtgttctcggcatcattttttcgagatttttcatcccgtcatgtgaatgaaggatactgttgctatctgaacgacgcaaacatatcacagtgctagtgttgacagcacgtagaagagagagttggcctggttggagatcagggtaagtgcgataaaggttgttggtgatggtgtgattgagaggtggagtctccaataaactccaaatgctcgtaggagacaccctctttagaggagaacttagtgagcttctaattaatagaaataatcattcatacataatataaactactaccttttacacataattcatttccttgcttttacccatgccatttccaccctctcttagcactgcaaaggactatactgcttaagagttcaatgcatgacacatgcaaaagaacatttgtatgctttaataaccttactagaaattttgacaagcgaataatcaaaagggtgcaataagagtttctagtttataaagagaaataagggaacaaagacacaaatgaaaacgcagtaaatgaaggataaatgtacaagcaaagaaaattggtattttattatttcttgatagtgttggaagtgaataatatcttcagacccttctaaattgacatagaggattttgagggtgatcattcatagatcttttacagtaattatcaagattgaaataacagaccatcacatcacatgtacggcatcttcgttcacagcttgacaagtgcaaaccagagaagagaggagactctgaaggaccaaacctgaagcatatcatgcagtttgagatcattctgaagcacaattctgtcccatccattggtcaagtcgtagaagcagcttcttgaacccttcttgaaacacatgttgcactctctaagagaaggatccaacacaatgacgtgcatgccagaaatcctttcgttttcctctagaaaggactcctccttttgtgtcagaaaattgttggcaattttcatagagaagctggcatcgtttaggtttggattcaagtctgactcacagagtttcttctgtatcagcaacttcacctcacatcccttcatttcttgaatcttttctttaaatggacttggcaattcatcactgctactgctagcacctttcgtggacgtgccttcttcttcgctctttctttcttcttctctctttctttcgtcttgtcttctgaggatgctattcaaaatctcagtgtcatcatcctcgaggaatgaaaataagtgaggattcctttgttgttccagtttaagcaaggcacggatacccttcctcaaaaatatatcatccgaatctccttctttctttacagctcctcccgaattcttttcctcatttgccattgttatgtatctacgttgcatattagagaagttttccttactctactctctctctctatacctctgtatatatatatatatatatccatgagtctagatatagtctctgtctaataaaaaaaattcagttttttttttggacgggaaaaaaaattgagatattgataactgaatcaatttaataagcactgcaaaaagtaaacaataaaaagtgaaaaaaaaagtattagattgaattgaattttaataatatttggataaatagccatattcgtattaaaagagcctattaagatatttatggatgaatttatgtattatatgaaataaaaatgattatttattaaaaatataatttaatctttatctttttaatgtaagaatattttattcaaaatagaagactcagatcaaaatacaaccattaaattaatccttacaaaacaaaaataaatctaacttgatactaatacattcaataatattaatagcatcttagcaatagattttaaactacacacacccaacaatctctaatcattgtgtaaaacgaaaaatttacgcaatcataaaaaagtcaagttagatccctcgaattgatcttcattactaatgtttgatcataaaaaaatttacacacccaacgtactaaaaaaaaattataatttattatcaatttagttcgtaacaaaatcataaaaaataaatatccctcaaattgatcttcattactaatgttaagttaactccaaggctatttacttgcatgtgagacatttttcttgcccccgtaagcattagttctttgaagcaaagttgacttttttaagataagaaaaaaaataaaatgttttgtttggtccacttaacatttgatattgcatgtgtaacaagattttatagttattatgacaaggacaaatgtgtgctgagatactttgatgtttaaatatatacaaattcgtgaatacatatatgtttgataaatgtgtcttatgattaaataataattttttaattcttatatcattatcttttggtctagttcctgttaattatctcttccttcagcctagcgtttgactataattaaattgaacagtacaaaatacataaatttgtttattgatccaaattgtttttaattgataatttacgtacattgttattatttataaatgtaacttttatttgagtttctttatatatggattacatgtctacatattttacttcatatcaggggatgctttccaataagttaatatgttttcaaggtctaggtagattcatttgtttgcaacaaattgaagtaactttgaaatctcttttattaattgttttttgatatattgatacattttacaaataaggcaacctagctctctcaatttcacgaacaaatgatcaaagtaatcaaataggcctcgtgatttcacataccaagtgaataacccaagtcccacatcgactagagatagtgccaagtcagagtatataagtggagaacaatcctcaccctaagagctagcttctgggattgagttaggttaaaatccaattacttaccgtagtcacaaatgacaaagcaactttcatcatattgaattatacaaagaatttaaaatttttccactattgcaatttaaaacctttattattaatcattaataaaacttataattaattatcatcatgattaattgattgcaacgaaatctaacaagtatttgagataaatatcattcattatcatcgtgatagattgataaacgtatgcaaggacctttgatgccttcactaatctggcatgcagcacagggccagggtaattcttttcggcaatagcatccacaaagcattccaattgctgaacaaggggaggggcactgtggcgaacgcagtggtgacggtgttgtttgtttataagatatattttatgaaattaataacatattcagataaaaaaaattaatttactagaatagaacattaaaaaataatttggattctcagttacggaaccattgatggtgatggatttaggagggcagacagtggtaccctattcacaggcaattagattgtgataccatatagaagaaaagaaagatctgaatttattgatgtataagtgaagtacgagtcagtttaatttgttaaataaacaactaaaggatatataacattgttatgcaacaaatgcatagagtttattttttgaattaaagataaactgaagaagtgcttgtagatattcagagatctagggagagctagttccaacaaacttcaactcacatcccttcatttcttgaatctttaatttcttcacatggccttgtaattcttggaatctccaacattattattagcactgctattgcaagcacctttggtggacgtgccttcttcttctctctttctttcttcttctctctttctttcgtcttgtcttctgaggatgctattcaaaatctcagtgtcatcatcctcgaggaatgaaaataagtgaggattcctttgttgttccagtttaagcaaggcacggatacccttcctcaaaaatatatcatccgaatctccttctttctttacagctcctcccgaattcttttcctcatttgccattgttatgtatctacgttgcatattagaggtttcatttctctactctctctgtacctatatatgagtatacactaacctaacaaattttacaactaatcaaatatactaatttaaaaaatcaaagtggaaaaactggaatattaccaaatcatccgcagtatatataggtactatgagaataagtcttcttaaagaccagtaaatgatgcgaaattatcaagaaaaaatatatttatattctttcttattttataatcttctacctaattttttgagttgcattgaaattgaaatatttacaagattgtaattcgaatttagaaaatataatttaaatttcaaaaataatatgttttggtgatgtaaagttatagagtattttattttaaataataactttattcaaaacaaataaaacacgttaattttaatcaatcataagattttgtttttattggatttataattttaattttaagaatacaattttaagtaagattgataaatattactgtaattatcaaaagtttaaaattaaaatcacactataattataataacaattaataattttaaaaacaaaaattataaataaaaatttaaaattaagaaaaaatttctcaatgtgaaatcacatattgttcaaggcataacgtgtttaagaaataattgatttatttgaattatgtgctcgtttttataatttaaattatgtatacgtgattagactttttctcataaaaaattaatattactaatatactttataaaatatttttggcatatttttatgttggtaaaaaaatttattgtaaagaaaaaaaattgtagatttatttttttagtttatatatatttagttttgccaaaatttaggaagaagattagggaaaaaaagaaacaataccaaaattattttaatttgatgttctaatttttattttactagtatgtaagtccatgcaatgcacggggaattaataataatattattattgttttattttttaacataatatatcttttattaatatgtaaattttaaatgtgttttatcttagtacttattattaaaaaaagaactgagtcttaataatattagtgaaattgcagtaaaaaaatatattagtgaaaataagtatgactataggccataaagcattccacttgccgaacaagggtaggggcattgtggccaaacgcaagggtggaggtaagagacctggccgggttggagataggggtgaaagtgagccaggtcgtctatcaggggcctttggcctgacctatttaagggctgacctgacttatttactataaagattaagttcaggctttttaaaaagtctgtttaaataaaaaggtcagactcaaacttaaaaaaaaaatatgttaaatatatcaggctgacctatttattatatatatatatatatatatatatatatattaaaacttaaaatagtatatttatttttctaaaaatattttttcttattatgaaggtggatgattaatcacttcaaaagattatcttaaaatttcatatatatatatatatatatatatatggttgaagtgggtatttatcacatccctacgagcactttcgacccatttgcggaggcaaaagaaacagatgcccccggggcaaaagagtatgtgcatatccgcatacaacagaggaatgggaagaagagtctgaccacagtgcaagggctgaagaaagagttcagctacgagaagatcctcaaagacctcaagaaagagttttgctgtaatggcaatgttgtgcatgacaaggagcttggcaagattatccaactccaaggtgatcagcgcaagaacgtttctcacttcctcattcatgctcgccttgttaggaaggatcagatcaagattcatggtttctaaccaactaccactaccacctttcttgtattatgaaattaaacctatggctgcgtttatgaaataactaaggagtttgagtttggaatatttggtcattttctctctgtatgattgaaaatccaagaatagtctgagagttgttatatatattactacatgttgtgctatcatggaccatgttttaagctatttttatctgattttaatttttaattaagagtatcagtttaacaattctaaatttataagaccactataagttcaaacaaaataagttgttatatatgtgctaatatatatgaaataatgcgttgcctgcccttcaagaatcaagttaattttaagattagaaaagaaaagaatataaacaagaaccaaggctatttacttgcatgtgtgagtcatttctcttgcctcgtactcattagttctttgatgcaaggttgcctcttttgagataagaaaaaaactttaatacaatgttttttgtacatttggtctacttaacacttgatcgcatgtgttaacaagattttatagttattatgacaaaggaaaatgtgtgggagttactttgatgttttaatatgcacaaatccgtgaatacatgcatgtatgataaaattgtcttatatatgattaaataataatttatgaaattttacattattttcaatgttattgaaattggttcgaacctactggttgaaccggttgaactaggaacctagcatcaattgggctgagttggctaatgaatcggccatgcgtgtggcccagagaaaaccgttttgagaagaaccaaaaacctcgccggtttttaggacccagacagggttggtgaagaaaaaaaaaaggcttcagaagcccaaaatggcgtcgttttgatgccccaggaaaaaatgcttcagacgcataaaacccgaaaaaaagcttcaatttttcttcatcttaaattcttcatttgttcacggcttagttcaaggcctcaggcactcatgctcactgcagcagggcacgccatctccgttgttactagcttgtgtgggtgcgacgcggtgcagaacagtgatggaggaagtgagaatgacttcggacggagcaacgtcgacggcgacgaatcggaggaaatcgtcgtggagggagagagagaacaacctccaaatgtagagatgatcgaagagaagaatttggtgcaagggagaagcaggaagaaaaaattggtggacgggggcgctgcagcaatccaacatgagaagattatatacatatatatatatatatattgagagattagttttttttagatgggcttgactagatgttgcttcttgtatcccgtttattattttctacaatttttattttgcatttcgaattggcttattgttattttggatttttgagtatgaaattatgaatgaacttttcttaatcaaataatgttagttatatacatatataatataattttaatttttttaatatagactgggtcaaaccggaccaattacttgtccaccggttggaccactgacctactaacctactacctcagctgggacaatgaccggatcaatttttataacactgattattttctttcgccaaatttatgttaattatctcttcttttagcctatcttttgattataattaaatcgaatattacaaaatacttaaatttcttcatcgatccaaattattttaattagagtttctccatatcaattacatgccaacatattttacatgatatcaagagattctctccaataagttaaatgtatgttttcaaggtctaggcatgttcatttatttgcaacaaattaaagtaactttgaaatctcttttattagttactttgatacattttacaaataagacaacctagctcttacaatttcaaatgacttgagtaaccaaataggccgtgtgatttgatataccgagttgcactactctttaattaaacaatacccaataataacaggagatgggagacaccttaataacacgtcattctcactcacagatgattatgctcctttaaggccacaagcatcaaggaagcaatagtgttctcggcatcattttttcgagatttttcatcccgtcatgtgaatgaaggatactgttgctatctgaacaacgcaaacatatcacagtgctagtgttgacagcacgtagaagagagagttggcctggttggagatcagggtaagtgcgataaaggttgttggtgatggtgtgattgagaggtggagtctccaataaactccaaatgctcgtaggagacaccctctttagaggagaacttagtgagcttctaattaatagaaataatcattcatacataatataaactactaccttttacacataattcatttccttgcttttacccatgccatttccaccctctcttagcactgcaaaggactatactgcttaagagttcaatgcatgacacatgcaaaagaacatttgtatgctttaataaccttactagaaattttgacaagcgaataatcaaaagggtgcaataagagtttctagtttataaagagaaataagggaacaaagacacaaatgaaaacgcagtaaatgaaggataaatgtacaagcaaagaaaattggtattttattatttcttgaaagtgttggaagtgaatagtatcttcagacccttctaaattgacatagaggattttgagggtgatcattcatagatcttttacagtaattatcaagattgaaataacagaccatcacatcacatgtacggcatcttcgttcacagcttgacaagtgcaaaccagagaagagaggagactctgaaggaccaaacctgaagcatatcatgcagtttgagatcattctgaagcacaattctgtcccatccattggtcaagtcgtagaagcagcttcttgaacccttcttgaaacacatgttgcactctctaagagaaggatccaacacaatgacgtgcatgccagaaatcctttcgttttcctctagaaaggactcctccttttgtgtcagaaaattgttggcaattttcatagagaagctggcatcgtttaggtttggattcaagtctgactcagaaagtttcttctgtatcagcaacttcacctcacatcccttcatttcttgaatcttttctttaaatggacttggcaattcatcactgttactgctagcacctttcgtggacgtgccttcttcttcgctctttctttcttcttctctctttctttcttcttgtcttctgtggatgctattcaaaatctcagtgtcgtcatcctcgaggaacgaaaataaatgaggattcttttgttgttcctgtgtaagccaggcacggatacccttcctcagtatcttatcaatcgaatcaccttctttctttacagctcctcctgaattcttttcctcatttgccattgttatgtatctacgttgcagattagagaagttttccttactctactctctctctctctctctatacctctatatatatatccatgagtctagatgtagtctctgtctaataaaaaaattcagtttatttttttggacggaaaaaaaattgagatattgataactgaatcaatttaataaggactgcaaatagtaaacaataaaatttgaaaaaaaaagtattagattgaattgaattttaataatatttagataaataattattttcgttcgttatgaaaagattaattaagatattcatagatgaatttatcaatattatatgaaacaaaaataattatttatctaaaatataatttaatctttatcttgtaacaatattttattcaaaataaaaactcaaacaaaaatacataaccattaaattaatccttacaaaacaaaaataaatctactttaattttattactacctaatacatctaatacattcaataatattaatagcatgggagcaatagatttcaaactacacacccaacaatctctaatcattgtgtaaaacggaaaatttacacaatcataaaaaaatcaagttagatccctcgaattgatctttattactaatgtttgactataaaaaaatttacacatccaagtactaaaaaaatttataatttattatcattttagttcataacaaaatcataaaaaatagatatatatccctcgaattgatcttcattactaatgttaataagttaactccaaggctatttacttgcatgtgtgagacatttttcttgcccagtaagcattagttctttgaagcaaagttgacttttttgagataagaaaaaaataaaatgttttgtttggtccacttaacatttgatattgtatgtgtgtaacaagattttatagttattatgacaaggacaaatgtgtgctgagatactttgatgtttannnnnnnnnnnnnnnnnnnnnnnnnnnnnnnnnnnnnnnnnnnnnnnnnnnnnnnnnnnnnnnnnnnnnnnnnnnnnnnnnnnnnnnnnnnnnnnnnnnnnnnnnnnnnnnnnnnnnnnnnnnnnnnnnnnnnnnnnnnnnnnnnnnnnnnnnnnnnnnnnnnnnnnnnnnnnnnnnnnnnnnnnnnnnnnnnnnnnnnnnnnnnnnnnnnnnnnnnnnnnnnnnnnnnnnnnnnnnnnnnnnnnnnnnnnnnnnnnnnnnnnnnnnnnnnnnnnnnnnnnnnnnnnnnnnnnnnnnnnnnnnnnnnnnnnnnnnnnnnnnnnnnnnnnnnnnnnnnnnnnnnnnnnnnnnnnnnnnnnnnnnnnnnnnnnnnnnnnnnnnnnnnnnnnnnnnnnnnnnnnnnnnnnnnnnnnnnnnnnnnnnnnnnnnnnnnnnnnnnnnnnnnnnnnnnnnnnnnnnnnnnnnnnnnnnnnnnnnnnnnnnnnnnnnnnnnnnnnnnnnnnnnnnnnnnnnnnnnnnnnnnnnnnnnnnnnnnnnnnnnnnnnnnnnnnnnnnnnnnnnnnnnnnnnnnnnnnnnnnnnnnnnnnnnnnnnnnnnnnnnnnnnnnnnnnnnnnnnnnnnnnnnnnnnnnnnnnnnnnnnnnnnnnnnnnnnnnnnnnnnnnnnnnnnnnnnnnnnnnnnnnnnnnnnnnnnnnnnnnnnnnnnnnnnnnnnnnnnnnnnnnnnnnnnnnnnnnnnnnnnnnnnnnnnnnnnnnnnnnnnnnnnnttttttttttttttttttggcatcttcaacagccaaggtaccaccctcattggtgtatattgttagctccatattgatgggagacttcatattaacagaggggatagaacatccaattttatttaaggcatcctttgaaactttgaacttttgcaagatacttttgagcagaggtggaggacacaataagctccccgtttataaagagattagcaaagcaatacttaagtctccattccttgaatattttatatggcatgcatatatatctcaacatctggtgtcaccatcggctggaaaacatgcccagttacctaccatagtcacaaatgacaaagcaactttcatcatattgaattatacaaagaatttaaaaaatttcaactattgcaattgcaatttaaaacctttattattaatcactaataaaacttataattaattatcatcatgattaattgattgcaacgaaatctaacaagtatttgagataaatatgattcattatcatcttgatggattgataaacgtatgcaaggacctttgatgccttcactaatctggcatgcagcacagggtaattgtcttcggcaatagcatccacaaagcattccactgaacaaggggaggggaattgtggcgaacgcagtggtgacggtgttgtttgtttataagatacattttatgaaattaataacatattattcagattaaaaaaaataatttacttgaatagaacattaaaaaataatttggattctcgatcagttccggaaccattgatggtgatggatttaggagggcagacagtggtaccctatacacaggcaattaggttgtgataccatatagaagaaaagaatgatctgaatttattgatggataagtgaagtacgaggcagtttaatttgttacataaacaactaaaggatatataacattgttatgcaacagagttattgtttgaacataaagacaaatgcatagagtttattttttgaattaaagataaactgaagaagtgcttgtagatattcagagatctagggagagctagttccaacaaacttcacctcacatcccttcatttcttgaatctttaatttgttcacatggccttgtaattcttggaatctccaacattattattagcactgctattgcaagcacctttggtggacgtgccttcttcttctctctttcttgcttcttctctctttctttggtcttgtcttctgaggatgctattcaaaatctcagtgtcgtcatcctggaggaatgaaaataagtgaggattcttttgttgttcctgtgtaagccaggcacggatacccttcctcaaaaatatatcaaccgaatcaccttctttttttacagctcctcccgaattcttttcctcatttgccattgttatgtatctacgttgcatattagaggtttcatttctctactctctctcttacctatatataagtatacacaaacctaacaaattttacaactaatcaaaatataataatttaaaaaatcaaagcgaaaaaattggaatactatcaaatcatccgcagtatatacaggtattctgagaataagtcttcttaaagaccaatgattagtaaatgatgcgaaattttcaagcaaaattatatttatattctttttttttttataatcttctacctaatttttttgttgaattgcattgaaattgaaatatttacaagattgtaattcgaatttagaaaatataatttaaannnnnnnnnntagactttttcttataaaaatttaatattactaatatactttataaaatatttttggcatatttttatgttggtaaaaaaaattattgtaaagaacaaaattttgtagatttatttttttagtttatatatatttagctttcccaaaaattaggaagaagattaggaaaaaaaagaagaaacaataccaaaactatttttatttgatgttctaatttttattttactagtatgtaagtccatgcaatgcacggggaattaataataatattattattgttttattttttaacataatatatcttttattaatatgtaaatttttaaatgtgtttatcttagtacttattattaaaaaaaagaactataagtcttaataatattagtgaaattgcagtaaaaaatatattagtgaaaataagtatgactatagaccataaagcattccacttgccgaacaagggtaggggcattgttgccatgacgcaatggtggaggtaagagacctggccgggttggagatcaagctaagtggtgacttctaataaaagcaacttatcttgataattaatatccatttgacttttttttttaaatgtattttataaaataaattttatatattataattaaataccaaaattgtgtcatagtatataataaaatgtatttgttttaatatttatataaatgctatattaataatattaaatattctatcaacatgtcaagtataatttaattatataaagtcaaaattagtatatttctaattctaaatattgtattaatatacatttaaattttccttcatcttgaatggaattttttttttaataacattgtatttgaattttatacttaatatatttgttaatgttccattcaactaaattcttatttttttatccaaatatcttttttattttacataggatatatgatgaataaaatagtttaatagtcaattacataaatttcttttataatatcattaaatcatatcttattatcatgtacgataaattttaattttttataataattattttgaaagtcattccaaattgatttgtaattaaagaatactgtaaaattattttataatgtcagaccatcaaactcttctatcaatattnnnnnnnnnnnnnnnnnnnnnnnnnnnnnnnnnnnnnnnnnnnnnnnnnnnnnnnnnnnnnnnnnnnnnnnnnnnnnnnnnnnnnnnnnnnnnnnnnnnnnnnnnnnnnnnnnnnnnnnnnnnnnnnnnnnnnnnnnnnnnnnnnnnnnnnnnnnnnnnnnnnnnnnnnnnnnnnnnnnnnnnnnnnnnnnnnnnnnnnnnnnnnnnnnnnnnnnnnnnnnnnnnnnnnnnnnnnnnnnnnnnnnnnnnnnnnnnnnnnnnnnnnnnnnnnnnnnnnnnnnnnnnnnnnnnnnnnnnnnnnnnnnnnnnnnnnnnnnnnnnnnnnnnnnnnnnnnnnnnnnnnnnnnnnnnnnnnnnnnnnnnnnnnnnnnnnnnnnnnnnnnnnnnnnnnnnnnnnnnnnnnnnnnnnnnnnnnnnnnnnnnnnnnnnnnnnnnnnnnnnnnnnnnnnnnnnnnnnnnnnnnnnnnnnnnnnnnnnnnnnnnnnnnnnnnnnnnnnnnnnnnnnnnnnnnnnnnnnnnnnnnnnnnnnnnnnnnnnnnnnnnnnnnnnnnnnnnnnnnnnnnnnnnnnnnnnnnnnnnnnnnnnnnnnnnnnnnnnnnnnnnnnnnnnnnnnnnnnnnnnnnnnnnnnnnnnnnnnnnnnnnnnnnnnnnnnnnnnnnnnnnnnnnnnnnnnnnnnnnnnnnnnnnnnnnnnnnnnnnnnnnnnnnnnnnnnnnnnnnnnnnnnnnnnnnnnnnnnnnnnnnnnnnnnnnnnnnnnnnnnnnnnnnnnnnnnnnnnnnnnnnnnnnnnnnnnnnnnnnnnnnnnnnnnnnnnnnnnnnnnnnnnnnnnnnnnnnnnnnnnnnnnnnnnnnnnnnnnnnnnnnnnnnnnnnnnnnnnnnnnnnnnnnnnnnnnnnnnnnnnnnnnnnnnnnnnnnnnnnnnnnnnnnnnnnnnnnnnnnnnnnnnnnnnnnnnnnnnnnnnnnnnnnnnnnnnnnnnnnnnnnnnnnnnnnnnnnnnnnnnnnnnnnnnnnnnnnnnnnnnnnnnnnnnnnnnnnnnnnnnnnnnnnnnnnnnnnnnnnnnnnnnnnnnnnnnnnnnnnnnnnnnnnnnnnnnnnnnnnnnnnnnnnnnnnnnnnnnnnnnnnnnnnnnnnnnnnnnnnnnnnnnnnnnnnnnnnnnnnnnnnnnnnnnnnnnnnnnnnnnnnnnnnnnnnnnnnnnnnnnnnnnnnnnnnnnnnnnnnnnnnnnnnnnnnnnnnnnnnnnnnnnnnnnnnnnnnnnnnnnnnnnnnnnnnnnnnnnnnnnnnnnnnnnnnnnnnnnnnnnnnnnnnnnnnnnnnnnnnnnnnnnnnnnnnnnnnnnnnnnnnnnnnnnnnnnnnnnnnnnnnnnnnnnnnnnnnnnnnnnnnnnnnnnnnnnnnnnnnnnnnnnnnnnnnnnnnnnnnnnnnnnnnnnnnnnnnnnnnnnnnnnnnnnnnnnnnnnnnnnnnnnnnnnnnnnnnnnnnnnnnnnnnnnnnnnnnnnnnnnnnnnnnnnnnnnnnnnnnnnnnnnnnnnnnnnnnnnnnnnnnnnnnnnnnnnnnnnnnnnnnnnnnnnnnnnnnnnnnnnnnnnnnnnnnnnnnnnnnnnnnnnnnnnnnnnnnnnnnnnnnnnnnnnnnnnnnnnnnnnnnnnnnnnnnnnnnnnnnnnnnnnnnnnnnnnnnnnnnnnnnttatttattaaaaaggtttgacttagacttttttaataagtttttctaattaaaaagataagacttaaactttaaaaatagcttattaaacttaatagattggcttattcataatatatatatatatatatttaatatatgcataaaattattaatattaacattaataaaagcttgatacatttgttttctatttaggtttgttggcctagatttaaaaatattattttgatataaaagaaagacttttataatcaagattttatagtttaaattttattgaatttatataataagaatttaaaagatggcatataatattatgtatttataagatttgaaaggatttcatatatttttagaaaacatttaaaatcacaagagtcgtgaaaaaaactaatcaagaaatgttaatgtttagattaaacaaagtaaaaacaatacaattttttaataatcttttagtagctaattaattctaacttcatattcttcataatatatcatttcttcacatatctaaaactatactagtcctttatgtattatcatcttcttatccttactcttgcatttgaacaatagactcaaaaaattatggtcatcattatccagtaatactgaagatgaagatttgaatactagttcaattgaaaatatgacgggtgcactgttcagcgaacaacgatgcctgttgatcagagtgggtaaaacttcatttcttaaatttggagttcccaatacctatatacattagcttttgtctttttaactcaattttgacgatgtcgatgtatcataccatgggttagttgagttgtttttgttgtttgcaatccacgtgctttgaccccttgcaaggtgactagtcgtcggcatgcaaatatttgtcttttttctttttttctttcgaattttgacagatttgttttaccgtcattaacgaaaacatattgtgtttgttgctaaaacatatcttacatttgttttttttttcttctgaaaaaaaattaatgaagactccggaaccattatccttaaattaatgaaggagtactttatatgatttttatgtttcgatataataaatattaattttttcttacttttatttcctagacaagtatattcaggtgttaacattttccttttcagctagcagtgtttgttatcatatatacgacgtcacgcagagttcctactcctatatatatatatatatatgtgtgtgtgtgtgcaccaagctgtatatgataaaaaaaatactagcagttctagaaagcaagcaatttaaaatggaagatgtgaacacgcggaaaattaagcaaccaataatctaacacgttttgatactaataaaccatttgaccatataatgtgagagtttctctgaatgaaggcaacgcgtgaccctaaatattgataaacaaataaggaaaagatatttttgaagcggcaagccaaccttgaccatacattaattatagtggccgcaattaccagaactatatatacacaacggggtagcatcacataatcgtttgagagtaaatttgtattgtatatttctgatcattatattagttattattctcaatagctatgtacctctcaaacatcttcgggtgcttctccgagggctcaccagaagaatccaaaagatacacatgcgatggtaatgtttgtgttctgaaaaacccgaaggcaaacatggggaaaccacagacattatctaacagcaagaaatcaagacatagccttcggatttcgtttgctcgtcgtgccaaaaggtcttctagttgttagatatatatatatatatatatatatatatatatatatcactcttgtgaatggagagagagaggctcaggttctgcatgatgccatcagcccatcaacactacagggttacgttttattggtttcatatgtgattctttgatcgctttcatctgttgtacaacggcgtagcttattctatatcatttataaattctacctctagtaatcttaaattcttaaagatattttaacttttatttttaatgttcagttattaattaacaacttatagatctctcatatgctaccctgtttgtgatccttgtgaagtatactttaaagagacgggttgattttgtagcttaaaagctctttagtatatgtattgaatcaatataagagtttggaaaattctgttcgacttttctacttgattaagtaatgcttcttgtgtgagtgaatatatatatccatctagctattttaaatgttcatccggtatctcatttatttttatctttcttcctattgcatcataaatattcatcaaagatttttcttctgtatttatgtcacagaaacagttggtaatgtacattaatgttacaaaggatttgaaaattccaaaaatgaagatagagtagttacacatgagcattttcatcactccaaaatgccctgacagagagagctaaactgactttttttttttttttgtttacaaacgagaaaaaaggaaaacaaaaaacaaccaacaagcctaaatcattcttctaggaaacttaatccccaaagcatccaccataagactatcctttaacatctgtgtctgaggagcttcatgcaacagctgaagctgattcgtgcattgatttgcttcccaaaaccaatgctgagaccttaaagcaggaagtttaggatttgtttggcaagttagaagttcttttgaaaactttaattttctattggaaatataatatttttttttctttctcaaaaagacttctaaacttatatctaaacagactcccaatgctggattcctagcacaccaaataaaccacattatgatggggattagaattccctgcttgcaaatcggctccttcagagcatcaagaccgtcagggacatgcaactgaccaaatccgcggttgacaaagctattatttattcaattactttcaaaagccctaagttccactttaggggtgagagtgagacaagggatatgggaataagtaacgcaatggactaatgggtaacttctcgccaaatccatattaaacaaacaaacgtagcttaagtctatctgttaaacaagttagactattgttttaatttaaggtttatttagttcaaaaaattaaatcttaaatcatttaaaaaatctttcagacataataaatctgtgtatttgaatcataattataattatattaacatttcactgtgcgtgatatttaattttgatattttattcttgtttgtatgtttttttttaagtcttgctaatatatttaaaaacttaaactaattaatttacatataattttaagttcattagattatttaaagggaagattctaagctactttaaaaggttttattacaaaggagattttactaattaggatttctaggtcaaaattttaaaagattaggtcagatatttaaaatatctatattatataaataggttagactcggattttaggtttaaaaaatatattataatcaggttttataaatccttgtctaagacaactctttgctatccttaaaagtgactaaaaattattaaaaaatgatttaagtcaatcatcttccaatatatgtgaataaccacattatgtaattccaaccagacatgttacatacaagtgtgagcctgtttctcgtgagccgcattagatcgtacttttaaataagctaaactcatcaaatttcatatgatttaagttattaatctttataaataacttcatttggtcttaatcttaatttcaaataaattgttaattttaattcttatcaattttaatttttttaagatttgttcatattattttttaactatgacatagatataaatcatctagcatcaataattatgagataatatgtaatgcaacaaattaatgtcacattgtcactaaaatagtgataaaagtattttgaaaatgttaaaatttacaataactaaaacaattttagaatctttaaaaaaatagaaaataaaaaatgaaatagagtcatttatgagaactaattaagaaacataattttaaaccatcttaatattgagctcatttcaaataaatgcatgagacttagaaaaaaaaatttaatcataagtcatttcaaccttcgtatttccaaagaaaattaaaactaaataaagtcatttatgagaactgaggaacataatttaaccatttttatgtttagtttgtttcaaataaatgcatcaacttcgaacaactttttttaatcataagccacttcaaccttcatatttccatagtttgatacttctaataatcacaagctactccaacctccataatatttatgtcaacctagaaacaaatttacacccgaaacacccgaaacactagttccgaaggggtgtacagtactttacttaaatgttgaactagcagagtcgggtaaaattaaacaaggaaaagcaagttgaggttttgcattcgagacatgtacagaaaaatatagcagcattaagaactaaaaacaagtgatgccttccccatcaattcagataaacaagtaatcataatcaaatcaatatcaaggcaaccgaatttcaaccatttgtaaagaatgtagaaagcatcatcaacaggatttattgcccgctaattgaaaaatctaagtaacgcttgatcatgaacgactcctaaatgttttatatggtttcaactctaggatagaacacagacatgctgcattaactcggtagttctcatctggaaaagatggaaagtcttgaagttgttttctgccaaatctgctcaagtcttctgtggcgatcacaaatcctacttaagaaaaccatcataagattcccaacataagcatccaagggaaaacaatcttcccaagcacatggtattcatttcatctgttctaaaagtagcacaaggaaaacaattttttttttttttttttatgcatgcaagaaggtttttggatgaaattccacaaccagtcaatattcctgtggaagcatccacatcagaaatacaataattccatgtcatagttgccggtctggttgctgagagtcaaccagcacaccagatgattgttttgcaggtgacacaggagattgggaaccaatattcatgttacttggtaccatttctttgggctcatacactgctgcagctgtattattacttgtaagctttgcaactagacttgcattattctgatcactcgagggtaaagagttgaattccacttgtttcaaacccttgttctcataattgttgaggttcctggtttggacattgagctgctgataaaagagattgacatgagaattgggtcttggctcattagaaccaaacaaggatgatttttcatctgatgtaagcccactactagaacaagctgaaggctgttttccctcatccattggtccattaacagaatattgttccatggtggattccacattcttacaatttgtttcaacctctattaattcagtagtagactgcaacttagtcgctaaactaggttgtggctgggcatgattattaagcattaatactggggttggaagtggttcatactctccaacccaaccacgaccaaatttacagccaggtggcagtgcctgctgaatcttctgggaagcaactttccatgcagtaggtcccagagttgcagcaaaacgagccaaactcctggcatatgaatattcatcttgtggtccaacctggtgccgaaaaatacaacattaatgctttaaagaagaaagctaaactattcaaggattagaaataacaattcactccttttgatacatacactaactagccgtggcttaacttcaccctcaaatgttgtaaatatggaatccgatctagtagctggtagattagacatattatcttgcacagatggtttcctttccaagttggagagcagatccctccctgaaacaataaagtaacagtcaaaagcgaacagctagataatgacagtaatatccaactgagagtatgcaaagttgaacaacgaaggcatgaaatctatgaagcacatatacttcaatttgtttcacgtatccatatccgataccaatactctaaaatacttcatcgatacgtaccgaagaagtatccaaatctataaagcaccaacaattaatagtttaatttgcttcacatatctaatatcgatactctttctatactttaccgatatacttagtggtgaagtatccaagcttttaaagcattttatgaaagtccaatacaactacaagaaacatgtaagcgtgtataatatagaaacactttcccataatgaaccaaaaataaaaattgttctctttatgtatgattttaagaaaggaataagattcatagtattgttcctatattcaaaataatagaaagtaatttataatgacatgcaatcatttataattttatttttcattagagacatgtaagggaatttcaattaaattaaatggaatgaaagtttctcatcattcagaatttgtacaataattttttttactaatgttcaagaagtatgcttttaatttagtttgcaaaattataattatatatttatcatgtttatgaattttatatatgtatcttacacgtaatgtattatatattttttttttaaaataatcgtatcattgtatccgatacagtattgtttctgtgtatcatagcatgaaatagacatttcttctgtgatacctgatatatagttttctgctttctcttgatttgcatcaatcaataaagcattcccctccagaagggcatcaatattgccaggtctttcacatacaacaccttgcattggaagggaagttggcagtacatcaccaatagtagcacgagttgcacctgatgtaaaatcaaagccaacaggttcctgtgaagcatgacccagcggcctcttttctagcttcttaacaagggaattagatctccttttttgttcagacttcagttcactttgagaacattcagaatcaatccttaacttttcaaactttttccttgctagttcttgtattgatcgtgcctgtaacaaatatatagggatcatacagcaagcacaacaaaatttctacttgcgttaatttttcaagggaaagcagtcaattttatacctgtttgtggtatatggtctccgccacattgtattgcattgcatttgaggaaatcaaaaatacatcactctgcgttcaacaattgcattcaaatatttatttgcctttcaaaatcactaaatcaggaagacaatatactatgtacggtttaaaaatggttcagatgataataaggggtagcctaatgcacaacatttgaatggattgcggatattcagcagctgctttaatgcacaaggtttgcggatatataagtggttcaagatgcaaaggggtctttgacaaagggatccaatggaaccatttctctttcttgtagtggcataagggttgaattgattgatgatggaagctttaaaaatgggtctctaattggtaaagacaaggtggaggtcaacctattgtttttgggagaaacaaaattgaacatgtaattgacatcaagagcatcttgagatcttgagttagtattgggcttgaaagttaatttttccatgatttgctttggagctttaggcttgccaagagttgaagtggagagatttgcggatatcttgaattgtaggttcttgagagttccttgtgtacctcgacatgtcaattggcgctaatccaagaagacaagcaacttggagacctactgtggaaaagtatgaaaagaaactagtgggtggagccatatgatcctctcaatgacagatagagcttgcttaattaattttgttttttcatcattacctctttacttcttttccttatttaagatcccatgtggtgtattgaaaaaaatgtgtccatacaaagaaggttcctttggggcggaggggaaggtgataggaaaatatcttaggtgaaatgggatgagatatgtagagataaaaataaaggaggtttgggggtaaggtaccttggcacttctaatgtagcattactagcaaaatggaggtgcaatttataccaccaaaaaggcatgttgtggagcaatgtgatggagtcaaagtacagagcatggaaatatttactgaatgataattctttaagagagtattcgatttggtggaggaacattaaaaaagggtgtaggggtgagaagaaaggtaagtggtttgatagtatagtgagatggagggtgggagataggaaaaatactagattttagagggatacatgattaggtcgtgagtcattagctaataagtatcctaggctcttccatatttctaaccaacaagataggattgttgcaagtgttggaagatgggggtgaggtcagggagtggacgttcgagtggcatagagagtgctttgattaggagaaaccctctctggaacaattatatcaaaacttgaattcgatgtcgatgcaaagagaccaaccagacaggtgggaatggcctattaaggcaaaaagaatatattcaacaaagtctacctacaaatcattgcaggtagacaatggcaaggaccaatcagatgacatatggagatttatatggaacaccaatttaccaccaaaagatgtagtgatgatatggaggccatgttggatagattaccaacaaggcccaacctcttaaaaagagatgtgtggctatatagtaaaggaagaagcatcatgccctatttgcttagagaaattgaagtcaattgaacatttgttatttctcagtccaagggctcagtggtgatgggtacaatgttataagtggaaggatatctcaacagtggagtggttatttctttgaaggaggcaacaacaaaatgagtctttatatggtgtgcattgttgtggtgtacatggagatcccgtaataacatgatcttcaacgatgacattttttattcaaagaaaatcctataggaggtcatatatgtaagttggacatggttgaaacgcccacccactaaactcccatactcattacaagaatgggctagcaatgtgtatgcatgtttgggatgatcatataggaagggtgtttgagagatttttctcaagcaaggggataagttttacagaaactgaaagttgattatgaaatattgggtaatcattcattcaaatatgacataaccaactagatagccacttggatgttacttttctttagattatttacttatggtatatcttatacctctttgatcaatgaaatcatttatttgttgataaaaaatgcacaaggttcgaaaatcatactcctcaagggaaaaaaacaagctacatataacttatgctaaatttcatatgattcctataaatagtatactcccgcaaaatttccccactaatttcaatcaaaaacatccaaatcactaatgcctatacaattccattatcaacataagtgaataaatcttgacatactctattatactgacaagtaagccatttaaatgtttcccctcacacaaatagcatgcaacaacctcttgctctcaacccacataatcatattgcaaaaataaccaaaatatcagaaaagaaaaggaacatcccccaacttcaacagtaacaactgacccatttacacacctcaaattgttccaaggtagaataagatccatttgccaacttcttcctcactgtggcaaagtccatcggatgctcaatcactttgtgataatcaggaagctgcattcaaacataatttgaactttcatcttagattgccttccaaaagcaagattaacaattaacaggaagaaaagccctcatacctctttcggatccactggattcgcatacacaccatatatatctttcctgtcaattcaccaaaagacatggcatcgccatgcaacaataatagttgaagattgaagatgttatatagatcattcaccacaattaaaaccaaaaggaatgcatgaagaaagaaaatgggaaacaaagtcgccttacttctgaagcttgtcaaggataaactccaaggtcctcttgtcaggcaacggaatcccaggtggaagctttgatggagttcctaacactagaaacaaaaacaaaataaagaacctagttaagaaactcaagagaacaatgcaataaaacaaacaatggcacacttgtttcagtatccaacatggtacattgaaaaaaaagtagcaaattatgtaattaagaattacgaattacattacaaccaaaacaacaaaacacgcacacaaacctggaatagagcagagccctttagaatccacttttatgccatttacctatcacaagaaacccatacacacaaaataaacaacataacccaaaaccacaaaaaaaaggcaaatattgtgtttatgtaataaaaatatgcgatggagacagagacagagacaaagacaaacaacaatgggtcctaggttatctaatttatagtcatagagactagagagagatgtgggttaataaaatggaagcaaacacaatcagagagtctggatgtgtgtgttagttttttatagttgacccgttagttacttatttcccctaaattcccgacacaaagagagagatagtaaacataattcaattatggaccaattggtaccaaaaaaatgaggtagacattgtctcaaattttcaacgctttgtttagttacctcacgcttttcttcatactcatttgcttcctcattccctttttcttcttcttcttttccccccttttcatatgatgtgtgcaccccacgctcccctctgcgactcggctcatagtcatcctcatcattgtcttcttcattgttgttgagcttcacaatgagctttaacttcttcttgtgcctcttctcgtcctcttcttggtcctcgtcctcctcgttgaggtagtcaatgttgtagcacacattttgacggcgacgaagactccggcggaggtctggttgcgaggtggccaaagatttgtcggaacggcgagccagatctgccttggagggacgccccctcttcttcttccctacgatctgatccatcatttgttattgttgttgttgttgttgttgttgttattgcgttcttactcccactctctttatatctctccctaaaaccctatttgagtttctctctcttggtttgctttgggaggctccattattttcaatggtgcctgtgagatcctaacctagctgtcaccactcggacctcagctttggattacggtgggtgaggtaggctgcatgactttgagtgtctagttcccactatttccttcatttctttctctttcttcctttattactacaattaataataaataaactagtaaatacaattaatatcaataaattttttcttattttgtgtgtgtgaaatggcgctactggctaggaatgacgacatcttttgctactcatggcctgaaccctcatttgcatacctttttgcctgctgcctatatctctttgtcatttcctccttattttcaccaactatcacctcttgcagcatgtaaatcccacctcaacttaaaaattaattaattaattaattaacatgacaaattggattaatgactactgcattggcttttctcgaggatctcgatgaggtccgagcctgactgtcaccactcgaacctcagcttcagattacgatgggtgaggtaagttgcgggactttagtgtctagttttacctgtttctttcatttctttctctttcttcctttattactataattaataatgaataaactagtaaatacaattaatatcaataaatgttttcttattttgtgtgtgaaatggcgttactggctaggaatgacgacatcttttgctactcatggcttgaactctcctttgcatacctctttgccagttgcccatatctctttgtcatttccttcttatttttttcaccaactatcacctcttgcggcatgtaaatcccacctcaacttaaaattaattaattaattaacatgacaaattggattaatgactattgcattggcttttctcgagaagctcagtgaggctcgagcctgattgttaccactcgaagctcagcttcggattacgatgagtgaggtaagttgtgtgactttgagtgtctaattttccatatttctttaatttctttctctttcttcctttattactataattagtaatgaataaactagtaaatataattaatatcaataaacgttttcttattttgcgtgtgtgaaaccgcattacaggctgggaatgacggcatctgctgcccgtgcccgaaaccgtccctcgcatgcctctttgcctgttgttcgcatctttttgtcatttcccccttattttcgacaactatcacctcttacagcaagtaaatctcacctcaacttaaaagttaattaattaattaatatgacaaattggattaatgactactgtactagagggagggaataaaatactcctatatagtaatgcagattttttagttattacaatggagaattttaagggaaaggttatgatgattttcttaatctattttgtgatgattattaggttcatgaaattggagtgagttagtactcctttgtccaacttttgcatctattaattgactttccttaatttttgtctctctttccaggatttaaataggaatacataatcttgatgaatatcttattcccatcaattcattgaataagacttttttaagtctttttaataaattccgtagagtaacgctttgatatgtgttttaaaatttaaaggtttaaatcattttttagtatttttaatttagcattttttttgttgccgttaaaaaaatgattccaatccttataaattatgatttttttttcatttttatgtggtttagataatatttttactgttcaaagagttatataaattactttaaagataaaaaataaaataagcataatttgtaagaattaaaatttaaaaaattacaaggaaaaaaagtaaagaaatacattaaattgcaataacaaaagatatttaatccaaatttaaattatgcatgtatatttgcaagctttaaaaaggggttgcatacaagttattgattctcctttttaacccgacatgttcttttgattacaggcttttgttttttcttttttattatttttttgtctcaaagctttcacacattttatttctcatgtaaatcacataaattttaaaataagtgactataagtaatgttacctacaacacacaatacaaaaatcaaccacgaaaacaagttcataataataactcaatatttttgtgaaacnnnnnnnnnnnnnnnnnnnnnnnnnnnnnnnnnnnnnnnnnnnnnnnnnnnnnnnnnnnnnnnnnnnnnnnnnnnnnnnnnnnnnnnnnnnnnnnnnnnnnnnnnnnnnnnnnnnnnnnnnnnnnnnnnnnnnnnnnnnnnnnnnnnnnnnnnnnnnnnnnnnnnnnnnnnnnnnnnnnnnnnnnnnnnnnnnnnnnnnnnnnnnnnnnnnnnnnnnnnnnnnnnnnnnnnnnnnnnnnnnnnnnnnnnnnnnnnnnnnnnnnnnnnnnnnnnnnnnnnnnnnnnnnnnnnnnnnnnnnnnnnnnnnnnnnnnnnnnnnnnnnnnnnnnnnnnnnnnnnnnnnnnnnnnnnnnnnnnnnnnnnnnnnnnnnnnnnnnnnnnnnnnnnnnnnnnnnnnnnnnnnnnnnnnnnnnnnnnnnnnnnnnnnnnnnnnnnnnnnnnnnnnnnnnnnnnnaacttttgtttgacgagtctcatagtcttggtctccgaatattaattatatttctttgtttcacgactattgcaatcaaactacttgtgaattttattaagagcaaattattactcaaatttcacatgcattttctctctcattttacattactttggcctcctttaacactattaattagtgtcattttttttcaaacccataaaagtccatctcctctacttccaacacaaacctaatcctcatcccaatcctcatttttgtatatcattttttttaaaatgatcagaatatttaataaaactacataattctattttttacacaaatataagtacatgtttaaaacttaaatttaggacaactaaaatctacttggtttgagtgtttatttttttttttcattttcaaaatttcaagatttagaaaatatatatcgagaaaaaaactaaattttcacttctttaaaaaaatgttaaaaacattaatttattgttttcagttttaggtctatttttgaaaatattttttaaattttaagtaaacatattttcactcttatatttgatttctttaaaaataaaaacaaaaaacactactcaaacaagtgccttgtaattgagttaaaataatctcacttttggttttcatgcttgatgatgtactcccggtacttgtccaaatcttagtgacccccttctaatttttatttcagattcggatttcctatattcaagaatttgacacattcaatcaatcacaatcgtgaatggttaaacaagttatattttatatcaaacttaaaatttaaactgtccaatctctgtctgactacatggattcattgtatgaatgtatggcatccttttatttcatagattattcctttctcaattcgaaacttctgccgagtttgtaatcgatgtcctcatatatatatttgtctcaaatctcaatcatgattcaagaagcaggcacagaattaaagaacgccaaaatgtcaatattatagtagtatatacgcatatttgtacgagtatgtataatgtaatagttaatcgtaagtcgtgattgaccgtaagtatatgtctctactcgttagttttttggggggttactacttaagccttacaagtacctgttaagtaggaaaagttgtagtgtattcttcttgaaagcctacatgatgaacaaagctacattaacttcgaaaaatagttgtgtgcatgtaatgtgacatggttaacatataaatatttttaaatatgtgattagggtttaattttagactggtgcttaattacaagaaaaacatgtgttagaagatgtcaactccataagtagatttataataccttcagagattatattttttttaataactggcggccaaaaaatattcggattaaagaaaaaagttgttcctatttagataaacgggcttttatgcggtatatatcaggttttttttttttttttgtaaaccaaagaaatgattatataaataaagtggtatatataagaaaaaaaaaatgttgagtttcaaagtggggatatgatgtatgttgtgtgtgacgttgaaaacttgaaagagtctgaaaacaaaacgtaacttgagcggagccaccgtatatacgtcgggacggtcatgttctcttgtggttgtggaacatgaataatttctttaattaaaaacttgcacataattaaatatttttaagaaaataagcatcagtttctatttggaccaaaaaaaagctttaaaaagtgtctgtgtgtgaatattgtacccttcttgctaaatgctagtccttttgcgtccaataaacattaatttatttctctgtcaaattgttagtgaagctcctaaaatgtaatattttatttgaacggataaacaccatgtgaagacgaataaatcacatatcacatactattttttttttcctttgagtgtcagagaatggtgtttttttttttttttctctccttaaattgtaaagggatcatggaggtctgtggaatatatacagagagagagagggtttaatttatattttgttattttaattttacactagcatttattgaatattgattttattgtcacatcataagacttatgacgaaggaaaatgattaaaccatattagttagaaatagatgtttacataaattaaattatctctcacatgcacgcacatatacacacatttcaagatagatcaaattattttaagaataatttttaataaaattacttatttcaatatatttttctgtatctattaaattttattaatccaaccaaagatcctgatgttgtcgaagttctggcttaaaaagatttgggttcagaaaactgtcttcagtgtcttttatcaaatgccacacaaagatgacttggaatgaaaggaactttattaagctccttgtttccttagaatttctactaaagtaacaaaatcatgatatatatgaacatagagaagtggaaagaatatatggggcggcaaaagtgcaatgaatgcgaatcacaagtctattttagctcatcaaaatttatatatatgaatgaatgccggattgaatttggagagtgatttatagtgggatgaagcatatatgttgcaagctgacttccattgtgtcaaggtgatattgtgtgaaaaattgaaattcttatataatttatattcagcagtgctttcaaagccaaaatattggggggaccactgtggaccttaaacgtgtactactgtacactttatgaacatgagggtttgacctagctttaaaagctttaagttcaaagcattaattatttatataaaagtattatatatatatatatatatatatatatatatatatagaaccttttactttgagctgaatgaggcttttacttgtcggatgttgcgtattttgatgtggctacctctgatagctttatatacaacccatctactttattaaatcataaagaacagttgagcaatactatatagtaattgttttcgaagttcatcagttggttcttttttggtcattcaattagatatagggtgccacgtgatgcatgtatgatgtatcgatctgtgccttcgaaagttcattaatcagcaacatcgatcagattaattataaactaactaaatttaattaaaagttatagttgtgcctagctagttgggtaattatcaaaaacaggcctaattaactttgtcacagtttagttgttgagggaattaacactaaaaaccaaggcaacaagtttaagaattttacttttgacgttgacaatgtttgtcccattaacatatgacacatcatattgacaataaaataagtggatggagtatctggaaaatactctttgctccactatctctcactagcattcaatcaaatttatcttttcacacgtaacgtgtacctttcatccagctttgtggtatctttaaatatcaatcatctaacagttgtctacctccaaacacaccctacaccaaaaacaatttggagcacacacaaacaaacccaccaagatgggtaaaagagctttccttattgtccatgccttcttcgtcttattcagctttggttcctcaaaggctgaaatggtttctgccgtttatgtgtttggagactcacttgttgacgtgggcaacaacaattacttgactctttccattgctaaggcaaatcatcgtcactatggtgttgattttcctacacacaaaccaactgggagatttagcaacggcaagaatgctgcagattttgttggtaagtgaatccaaattcactctagctattaatatgccacttcaaacagttgtatagaatatagagacattttttaatagaatgattgtgtgggttgcagctgagaaattgggtttgccaacttcaccaccttacctgtcccttataacatcaaaggccaacaaaaacaatgcatccttcatggatggtgttagctttgcctctgcaggtgctggaatatttgatggtacaaacgaacgttatgtaagtgaccaaatgtagttacctctttccctttaattttttattacctccaggcttttttaaaatttatttatttatttattctgtttatgcaatatatgggccaaattaaatagggatatgtgaatctgacccaagatgagcatggatgttttggatccatctctcaaccaatgttattagattcagactgattattgactcgatcaagatattgggttaccaagttacggatcaatctaatgagttatcagttgactcgcatgatccgatttatattttaaaaaaaatcaaaataatttcataacatgtaaacttgtatacttaggatttaaaatttaataaaattcattatatttaaaaatagttatcattttatttaaaattttgagcatacaacatatctttttcataattcaatatatataaacaaccttaaattagaatttaatttacacaaattactcaaggaaaatttgcaaatggtaacaattttatcacttaaaatttctaatatgagtgatgttgttcgattgggaaaaaaactaaaaaatgcatgatccgccgagttcgagtcactgattcgagaacatgcttagtcagattgaacacaccatatcacatgcatataactgatccaacccaacaagtgacacataatttctaggaaagtcgattcctaggaattataattcttagacatgtgtaaaatacatatagttggttttaacatgtttcttggaaattaaagattcatgtaaaataagtaactaaaacttttcctcacatcaggaaattatttgtattcttacccctccttgggaattttttttgcggaaaagtgagttaaaaatataatttcctgataatctttttttattaattacattccaaacataaaaatcataatttgtcactttaagattccttcaaaaataaatacttttcatctaccataaacctcttaggcacattattaaaaatgaatgataatcatatatattcactttcttctttatatcattttaatcctattttctttattcattaattatttttgtaattattattttctctatctaccctttctatttttttctttttttcttttttggctctaataaaccccaaattaaggtatacctttatcattactcatgatatatatatatatatatatatatatatatataaatatataaggagaaattcacttactttaaaagtaattcttttaaggttattctttattttcattattcataatcttaatcattagattttaagaaaatcaacaatcaaaagtaatactactcttaaattaagtgaattccctctatatatatataatgttccataaaaatcgttactctcccaactgagccaccccttattctaatgttctatatattgttggtataatagtgtacttaataacaatatatattattatatatcatttcagagacaatcaataccgttgagaaaacaagtggactactactcaattgtgcatgaggaaatgactcgagaagtaggaggagcagctggtctacagaagcatctctcaaaatcaatcttcgttgtggtgattggcagcaatgatatatttggatactttgaatcatcggatcttcgtaagaaaagcaccccgcaacagtatgtggattccatggctttctcactaaaagtgcaactacaggtaacacataacatcacatgaacatgcttataatcaagttactatgctaccaatcttcattaatcactgatcaatagatagacttgctttacttttacctacccatcacatcaaacttcaaaaaatttgtaccgttgacttaataattatattgcggggttccaaattccaatacatgcaccctatttgcatgcatgttactttcttgtaaatgttctattgtgcttagagggtcaactcttgtgtcattatttaatttgtcgtcttctttttttcggtaactttttttaatttttttttttttttgcagcgattatacgatcatggtgctcgcaaatttgagattgcgggagttgggacacttggatgctgccctgatttcaggctgaagaacaaatcggaatgctttatagaagccaatgacatggcggtaaaatataatgaaggccttcagtccatgttgaaggaatggcaatcggagaatggaagcataatctactcctattttgacacttttgctgccatcaacgaccttattcagactccagcttcctacggtactattttttacaataacatatccaaatattattgtctttcttttcatttctttattaagaaacttccttctcttttattttttttatccttttaattcaaaaaacttaaaaatttattcactttttttctcttttatttctttcttccatatttctttcctctaccaaaccatgtttattagttttgttttgagtaaatgaccaatatttattctctaaatttgtatttcgttatagttttaatcctaaaagtaaataaaaaccaaataagttcgtgaatgtttttaatgtttcacttgggtctctaaaaataattttttttttctcatttttgtctctaatattatgttgttattagtagtattacttaagttccccatactagagacccaaaatgaaaaaaaaaaaagaaaaagagagatttatttcaaagacttatttaagttttccttaatttcaagactaaaatgataggaagatagaaattcagaaaataaattggctatttactcttttgtttttataaagttggattctaattaaaataagtttaaataatcactttcaggatttagtgaggtaaaaggtgcttgttgtggactgggtgagctgaatgccagagctccctgcctgccattgtcaaacctttgtcctaacaggcaagatcacatcttctttgaccaattccatcctacggaggcagctgctcgtttatttgttaataaactttttgatggcccttcaacttacacatctcccattaatatgagacagctagtagctgcctagctgaagttgacgattgattttagcccttcaatgacatttttttcatctaactcaatatcaaatgccaagtgtgtggtgttgggacgaaaaaaatactactagattcgttaccccgtagagtaatctatgtaggcttcatgaaaagtgatcactggctagccaagtgtattattttacttgaagtagatgatatactaagattggcataacatgagatatatgaaggtgtatccatgacaagatgcattcgtgtaagaaagttgtttttttattactcgtttaattgcaccggtgcaattaaacgatgaaatgatcaacaacactatcatttatgttatctgaccaagtagctatagtgataactgataacttatgttgataaggtgacaagatccaactgattcaaggtcaagagttgatgtgaatccaagctgtgacaaaccgaaagaaggaaaggaaagagaaacggtgtggtaaaacatattaataatcaaaattattagaattttctaaaaattattatgagcaagggcaacaattaattgtggatttttagctgagaaaaacgagttaatgtttaaatcattttaaagatacttgataatatatttatttttttgctggataaaaggggctaaagcccaataaagcagaaactaaggaacagacagaccagctgcatcaacacgcagcaaagaggaaataaacgcaggagcaacattaaaagcagaaaacaaagctgaagagagaaaactctcttagccatctcatcagcaacccggttgtgttctctaaacacgcttctgaaacagcaacccacaggaattctggacatcctctgaatggtttgcactctctcgagaagaagatggctaataagagacaaagtagagcagagacgaacagcttcagccgcatctgattccactaagacgtgcgagtaacctctatccaaagctagctgaaggccattgaggatagcccaaagtttggcttctaggacataacaagttccaatgtttgccataaaaccatgcaaaaagacaccataatcatcacgcagaactcctccgcaaacagcctcgttatcagacattctaacagcagcatcaacattaactttgatccaacctaacccaggcgttatccaccctaaagtagatgtcggaacggttgggtcagtatgcaaagagaaatcttcgaggaaactaatagtaactaggatgcttgataatttagcaatataaagaaccacttacaaggaacttatttttaatttatttgaacttattatgatatgttcataagttctttttatttttttatttcaataaattcttcaaaataatatgaaatgaacttcaacttaattttctcttcaatataaaaacaacttatacataataaatattattctataagtctctaattaaactatttaccaaaatggaccctaagtttgtaaaagacttaaaataaaacacggattcaactcgtcttgacataaatgtcatgatcacatatggcatctcaataattcctacgaaaacaaccagcagaagacttcagttcatgtcacgatgcattaagaactagagaaaatacatcctcaaagaaaagttttaagtcgcctttgtcaatatcatattccaacaatttctccatggcatcctgcattccattcagaaatataatttaacatgtctctgagagagtaaacaatatccaaagctgtaatttggttcttgaaaattgatatgacaccttgtattgacgatcttgagcagagatgttctcaatgcataaccgctgaacatgtttattatgagaaattcttaggtacacctggagcaagacgtgttgctctgatccatttattgttcgccatgtcagcattatgggtcattgttgtttcctaaattaatgccaattttttatttttctaggtagattaatgaaaatttttaatttttttaggtaaattactgacatggtgaataatgaatagatcaaagcaataagatgtcttgctccaggtgtatctaagaatttctcgtttattatttgaaacggtatccaacacagctgttgctctttttatgatttcctctggtacacctgcatgaaccgtacagcttgttctaataaaataaataagagcagaacataaaatatgctttatacatttttgttatcagctaaaaggaaagaaagaatcgaacaatatgcgtagtgtactcttttgatcaggaaatatcatttttaaacagcagttttgtaaattaccagcaagcagtgcacagtgcagccctgcaggattccaaaaaccacacatcattttcatcagtgtttcaattgatataacaaaaaatgttagtaatatactaatccacactttgaaaaacacttgctgaaatttatttaaacttaactcactaaatgatgtattaaaaatgcgttgttaatatttctctttactgtgttcgaaagtgttttattaatgctcatgatataaaatactgataaaacaaaagcataccatagctatgatgcgcatgcccagggacaagcctgtgaggaatatgatccacagatatcaaaaccacttcaattctatactaatctcaatagtccagacaaagtacaaggaaatctcctctgcacagtgcattgcatgaaccaaatactatcattcatgtcatgtgcagattataatgtatcaggataagctaactgaaacagatgcatgattaaatgtgtaaattttggcattcagttttccatctcccgagtctaactaaaaatgtttttgtttattacgttttatatatatatatatatatatatatatatatatatatatatttgttaaattgtctgatcaagtgaaggtgaagtacaatagcattcctaattcagtaattcctatcaaattctttgacatcaaatgaccttatgacgataaatataattcttagcatactgcatggctgaatcaacaataaagatacctgtataaaaatacaatgtcttcaatatgtgtggaattttcgtcgggcctcagtatactcattgtgtaaatcttaatctgctcagactgaaatagtccaaaggaatcaatgttgatgatcactcaactgaggagttcaaacactttccacaatgatgcacaagtataagtacataaccttggtcaaggaatgcacatgcaataaatccatgagatgaatgcacacaaaaacctacaaaatttacagaataaatgacagttacaatctctcggagaaactgcatatagtcacttcaccagtttgcgcttatacatttcgattacaatttgagtctagggtctgagttaatagttagtgattagtacttcctcttaataaaatttccagggaaattgtatttcaataacaatgtcctagaaaactgatgcttgagagcgtaaaaaaactgttattttttaatttcaacaaagataaaggaatgaacttttaacttctactctcatgattaatgaacattaattagttcgtaaatatttaatcaaatagaacgatccttaaccaattaactaatagaaataacaaaatcaaacttgtaaagggatcagacacttataagtttatagacttgacccgaggacaactggaagcataaagatgttcatcacaggaaaatgctgtgaagaaattaaaagcaggctgtgaagaaaatgataattcctgaaaagttgaattaaaacatatatattacacattttccggaaaagaagtcttaaacctttgaaggttcatcagtcgtgacaaagtgagttatggtcccagcaagtagaccaattccatctgaaaggaagatcaaaacatttatggtaaaaactagcatctgcaggacacacacattccatgtatttatgatttagacacttaataaacattggattaacagaccttctgtaagagtgcctttaccaaattcatccaccagacacagagaacgtgaagtagcatgcctgcaggtttcctcaacattaaaagaaaaaattaacacaccccaacccacacacacatatacagttatacacacactcttcttttaataaactacaaatctcctggaaccctacatctatttaattgttcagataaaaccattcagaaaaacatctgcaattataaaacaagtgggtttaattatttattttatctttatacatgcatcaacttttcattttagtctctacctaaaaattgtccgtataaaaaattctctgttttagtccctattggaacaatttttttatgttttaattcatgttgttcgttttctggtagtgtaaaaccatcacaaaatggaggaataagactaaaacttaaaaaaattccttgtatagggactaaatgtaaagtttttaggtatagggacttaaacgaaaggttggcatggatatagagaccaaatgattaattaaaccaaataagtgagtaatatggaagacaggagcatcctgcatgatattctaaatactgggaggttatacagattttgcctatgatcgatatatattcaatgtattggagatatccttattagcctttatcttggtatacctgagcatcatccctatttgatgtagatcaatcataaatgttgattgttcagctgccataagccggcttcctgttgcacaaaatattccccccctccccaccaaaggaaaaaaaattacaattgtaaaactaagatcagcatacaacaatgtaactcccatttcacaaaggacacgattcataagaaaatgatacctatctgtcagacccacagttgctgcatcagctggcacaaaactgccaatgtgggagagaaaaacaattatagcaacctgcaaaatacttctcattacattatgatcatagagcaacaaggagcaaggttgtagcatcatgtaatagccacacattagactgtatgttaaggaatcaacaatctgatgaactgtaatgtggaagccaaaaatttttagtcttcaagacagtccctcacaaaaatcctttgctctggaaaggtggataaacaagagctcatcacataaaacaatacaaatgttaagatttttaatttatttatagtctgtcattttaccgtaaggtaatcatacaacaacaaaataatataagaaatgttaaaaattgtttaactttaatattgagtacaataaatttatattattattaaattgtgatgtcaattgtcatgtagtaaatttgatatattcttgtatttatcaaataatataataatatgttattaaataataataatataaagtaattgttatcccaaaaatacatggtaattaaattctttttcaattggataacagaaaaaattgttacgagtgaatatcaaaaaataaaaacatgcaaaacccaaatcaagacagaccagataaatattaacaattgtagtttgtaggttgtcagaccagatgaatattaacaaccagaagttgataacttgatacacgtactgctaaagaatagttctgcaacacttttttcatttagagactagaatttagaaacattctttttggagactagaaggtaatgtcatagaatgaccttttcaacataattgctatttaaaacagtatgatcaaatcatacagaatacatataccagaaagataaagaactaataactgacctgctttagatagatactttttccagaaaaattaggaccagtgatgatattaattcttcctaatgtaaagaacaacggatcagggattaataacaatataatgtcatcaaaatggatttcaatgatataagttagcaattatcagttatgtatgtctacatctatttaccatcatgaagaatcttagtgtcattaggaataaatgtgtctacagtcatttcctgcaaaacatgcctacaaacaaaaccagtttttatcattaagcatatcaatgattctccatttccaagaggttcttataaactagatggtttgaaccttccattttttatatcaagcaaattttcttcagtcaacgaaggcctgacataattgttctgccgtgcaaccaatgccattgacaaaaagctgaaataaaattatcaatgataaaaaaaatgtctgagcaagcaccagttattataatgacaaaatatatcttaccagtccagttcagctgcaaaagttgccacctttatcaaataggtttggaacaacaatatacgtgaaaacaagtctctggtgatcgccctctccatatcttgaataaaacaattcgcaaataagtaagatttgcaccagagaccaagtgttataatttgaatttaggaagaaaataactacctacatcacatagctcttataacacttaagctgtgtcaaggaatttcatatttttttattaaactctaatttcttacaactctacacgtaatattacatctttatagagtgtgcctgtttctccattatcctgctttcaaatgcacctcaacatgactaaaccaaagtcatggattggcattcaactggattttaagtggagtttttccatttcaaggttagagcatgttacaagtctgggcaaaggctcagctacttacttcaaagtaaataaataaataacaatagggaaccatcaaatgtatgcttaaaatacctagaattttatggtggatatctcccagcagactgtccaattctcgtgtctttggcgttctataaaagtatttttttgtttctccatctgtatcacaaaactgtaattgaaatgactaccatcagaatataacattaattatgtaaatcacttgaccaattgcaaacggcaacatactgtgtattcccaatctacaagttgctccagagtggtttcatcgggtttttctccaaagatacacattaaatatcctacagtagaaagatatgcattgtgcaataataaaatatccagtattgtttaacatccgaaaaacaaattgcaatgaaaaaataaatatgaattagtgttgttaaacagccacaatggcagcagggcagtgccaccctgccaaggcgtggcagaaatccagcaaatcactgtgtgggacacttggagttgaggattccttgtggtggcaaatggtggctgcaagatcatgacaacatcaacatggtggtccatggcgttttgtaaaggacacttttgttgtctccgagaaatcagaaaagggatatctaaaaagcccagcatcttccggcggtttcctctggcaatttacggttccttcttcagcaacttgctggcgactggaccttcacctcaggctctgcatgttcatctctctgattttcccagtctcaggtttgcctttgtcactgttctctattccctgtttttgtctactatgttccctgcgttccctcactgttttcactgtccttgtctattatgttccctgcctttgtcactgttcattctctgtttttgttatacatatggcttcattgatttttgtctttctggttttgtatgatgacaagatttcaacttacaatctcatccaaattatacaaaccttccataactgtatgttagtgttgtttttcacaaattttattttttttaaataatctttttacaagtcacttcaacaatgactgatgtgaggataactagagacgttaatgggggcaagaattgacctatcatgaaagttatcggttcgagacatgtatatatcattatttgaaaaaatatattttaatttttttaaaaaaaaaatttacttaaaaaaaaatttacttagatacgacgaatgtgtaagaaacttaatgcgagaacacttttttcatttaaaattttggaattatgtattaaattttggaataatatataaagactatcccttaaatgtatgacacattattaaaagtgataatatatgaattattttcaaaatttatatttgacccaaaattttatattaaattttacttataataaattgatattataataaaaatatttaaacattaaacatataaatcaatctaatccattctactcaaccgtgaatgcttgttttgttttttctttatcatgtatggtagcacaagtttggactgcaggaaaggacagaccggcatgcatttcgagaaaacgaatttaggatgggtttcgtagaaaggaaagaagaaaaaaagtaataaaggtctaaaattcatactaatttattaatttattttttcattttctctactaaatccacccttaaaagaccgggcagagtgatttaatgcaattggcaattgccacggactcgtagtatataacggaacggaccaatattataacttggatccccgttttggtttgggttatttgagtgcagaggagagtgaatttgtgatgttccgctactactaatactagttgatatcaattatgaaaccgtgttggtcttcttccagtccatctagtcttggcatggcatgactctcagcgtttcaatcctgacctcatcatcttcgcgtgttgtggcttaacgtgcgcaggaaatggaggaggagcagcacacttttgtgtccaaagccagaaccgcctttcattccgccgcggccaaagcggagcgcgttctcttggatttcaaatccgatccaggttctcctcgcgccacgtcaatcactatctctctatttttagttttcctttttctccttatattccgaacggatgtgcattttttttgttttttttttcttctccctttctcttttagggagattcaaacaaaaaaataatttaaaaaataaaataaaaataattattattattattattgttttcggaattagcattgactcaatttgttgaccgtgaagaagatcacgataagcagtcgtcgcccaaccccttcactggccaacaaccagaagctgaatctcctcacaccgacgaaaacgactccaaggtaatggcaattatttatttggaagaggaaacattgaacttaactatttcaatcctaccgaggttcgattcgttgttgttttgttttgttgcgttttttttgttttgtttttattcccaacgtatatgcacttccgggagctgtatttgattatcaaacaaaagtatatttgtttcgtgagtttctaatttgaggttaataaggaagggaaatttagatcagggtgttgaaattcattgtttggtgaatctaatgaactctgtttcttatttaatccgttccctcaatgacttcctcaaaaaaaaaaaaaatcacaattaattgtgaaaatatttgcaggagtcctgcaaagtgaatagttataatttcgaaatgagtcttggcttaaagatggtcgaaaactgtttatatgtttttgtttgcgtttatgtctaggtgtttattacgtgacatttgtcctgtaattacttacttacacaattggtctttgtaatgggatggtgcagcttcatagtgaatcgaagcatataaagtggaggcctccacatttaggaataaagcaggattggcaagataaaataaagaacatccggagagggagaaaagaagttgaagatacagataaagttggggatgcaagcatggccattccattttatgatgataatttgtacctcctgaatgtaaagaatgatctcgaggccaaggtaagaaaatctgaaacattttaactcaaggattcatcttccaactgcgtgcgtatgattgaagtctctaaaccaggaagttaagtcaggaggatgttagcaaaatctgatcatgtatgctgactatgagcattttgttttcaaaatagtctgtcagattgtgtcttcatcctttgtctagtaagttagcaatgcttggtatgcttgtgataaattggtaatgcatgcttattaggtatctcatggtgtccctctttccagtaaaatctttgaagatacaattgagatttcttattgatttgcctatcaattatataaatgagtatcttattgatttgccaattcagttacacatatgggttgctttaatgatgtatgagtaaaaactttgattcaggcttcagaagcaattccctcagttgaaggcctaactgctgcaactaaagaccccattcctccatcatctgtgctgaagcaattggctatagctgttgagtaagttgtaattgtttttgaatatattttttgcattctgttgtcccgttttcctgccgctttttgtgaactactgaaaggttctattcaatgatgttgcattctatttctcgggttgcaaagttcccccacatatttgtcaaatgcaatagttcaacaacataagagtcttgttctatcattcagaaagatttctgctcaacaatatatctagcctcttccttaaaatttttttacctcttgactagggctggatgtaaagcaaagtcaatgaaagattttatagcttcatcaggaggttcttcacctgctagagagagggcaggcttaagtctcttggcagttaaggctttagtgctacgtgaaaaggaggacaaacttacatctgagtttactagcaataagaaagttgtgcagttaattaattctctgtttgatcctggtatgtgaattgtaggtggcttgctgataatgtaattatgttaaagaacgttttaatgcttgtcctcattttccttaacccattatctgttatgatctttcactttcgttgtaatatttgcaagatattcgcagaaggagatttccttagaagaaagatcgactctaatctagaggaaagtgctatgacatctttgccaagagatattcatggtgcgcctcccgaaagccttgttgttaagctagctgaaatccttggaaactacaagactcttcgaaaaatggctcttttctggtgcggggttgttgctgaagtatgtttaacttgaaaagaacttatagttctgatatcatgatcatacatcttattacttacccagaactctagatttaatttacattattgatcaatttttctgttatatataaacaattatctgaagtaactgtcagtttaagtgattatgatcttagtaatagagtgcatcatcatcattgatatcttcatcttagatcacgtgatttggccaaataaatatgcaagaccacttgatgatgccatgttaataaatgtcaaattttgtttcctacttgttttgatttttaatagttattttaaaggtttgagaacctcattttgtttgagcagttgggtagtgaattttttttccttgttttatgctgcttcttttttcttttctttttttaaattctggtctattaaagtttgcatccaattttatccttcccttcccctttgcaaaataaaatttgtggaaaaggaagcaaattattcatatgctgtgttattggaaactttgaaggctttcaaaccaaaacaacagaatccctcgtgtactgtaaagttgtttgtctttcttttcctcctcaaatctgtttgtctataaaagaaaaaaaaaatcatatacaaacttcttctggtttaggatctgtaacttgaacttaactagaatcactaatcctatgtttccttaattaccagctgaagaagaatattttaaacttaattagttattttactgatacagctaaggaaactttggtttgaggaacaatacttaccaggagtcccccagaatgagattcctgatctgaagtcatgtcttctatatcaacaatttcaagtaattaattgctgcatctctcggaaaaggttccgtattattgccactgaatctttagactctatgatgatgcaagctaattcagacataaaagaatcgactgattgtagcgccagagctcctgcaagccctgttctatatgctagattgaatagtggggagcttgttcttcgaattggtgcagatcatcctgctggagatatgacattgttggaaactggcgagcctgtgtattctccaatcactcaggtttgataaatatatttttttctatataatcactatttaaaattacacttatacttgagaactttgggaccatttcatgtaggaaggacctttgcttacagaagatctaatcagggaaacagaggagtttgtgctgcggacagggaggtctgtatgccaactgagattcatccatgatgcaatctgttatcttaaatctaaatggactttccgttttcgctatatatagcgtgtgaatcccaattgactctttcatataatgaacttctttattaaaataatcaaggtcatcttgcttcttgggctcttcattgcttggatgtgttcctgtatgccttttttaattgtttcgcatgatctaaacctatgattatgacctattgactcacatctagactatgaactcccacgaccagggtctgagtctggattctgaacctatgacctatgtctttggtctttttttttaactaatttctagaatttgcattgatgaactagttgatcaacaaacattcacagaatgctattttgtaatacatttatgatcatatatctgtttcttatgtaaataatttgtaaatgctagctttctttaattacagatgtgcatcaattatgtaatagcttatagttagcatcagttaggcattttcttattacaaagttacctttcatggtcagtgttggtgctgggtgctctcaactgctctcagatatgcaggctttcaaggtaaggggctcccttgaagggaacttttcttactgatattgtgaatgcttcttactatgttgaatgtgcctaatgttctgtctgagttagttttgtttgttatcatattttaggctgcaaatcctggatgtattttggaggattttgtaagatggcactctcctcctgattggacagataatgaagcaagtacagaggatagtgatgtttttgatagtggtgaggcattgtctgccagaggtcagctaagtcggcgaatgcaaaaagaaggtgtactttcagtcttttccatcatagattgatgtacttaaattctcctgcaaggctattttgtggtatttttctacgtaaatggaccatcaacatctgataaaattgtggatttaccttgcttgaaacaattattcactgtatcttgtcatcgattgtagtaaacttttgctctatgcttataaattttaccatcatttatgtgttctttatggctttgatttccaaagaggttgtgatttggtaagttgaggaagatatgcatggaactactgaactacactatgtatgatgggaattgtttattgcagtctaatgtaggaacttttgtggcaaactgatcagttttgggtccagaatgtctaaatgtagagtttgaataattttgaatgttgaattaataatttcattgtcagtcaattgatatcagcatagatattcagatttcatattcctaattgccttgggaaaaccatggaattgaaagtgttgaaaccctattcctcaatctttgtagcatctatgtaagatatattacctaaattggatatcatatcacatctatggtaaagcatatggagataagtaaatcttgagtactgtcttacttttattataagttataacacacaaaatctgcaagaaatacgggaactgtcgagcatttactttcttctgctttcatattattaaacatatctgatttgtaggtaatttatggcgtgaattgtgggaaacatccaaaccagtacctgctgttaagcaggcacctctgtttgatgaggatttggcagtgtaagttggtgatgaagattttttgcattaatttatatatttcaaccctaaagccatcccttgaatcccttgttgcattcatttatagggagggcatcctcaatgcatttgaagacatccatccatatgatctttttggacagctgtttgtttctttagtaagttctttattttatctttttatcacattgattaattttgttgtgtatagacagttgtcatttgtcattacataatggatctctgaagcattaatattataactcataagtgatgtatattaattaattttttatttgaaaattgtattttcttattttttggagtttggtggctgaatctaaagcagattgtagaatatatagtaatagacttgaatcatgaaggtaccaatcaagaactaaactattttcctgtaatgcatgtcataggagaaaaatgtattgacatctaggctctaggcattttttgcgagtttagaattattagattggcatgccggttgggcatggccacacatcccttaacaaaacctgcctagagctctagtataaggcaacttgtgttatctatgctggtggttgaaagaattttatacgaacatataaggcaattggtcgcctccacatgtccattcccaaaatctccctagagctctaatatataatgcagcaacatgttacgtatgctggatttcaaaggactctaggtagcataggattattctttaacacatgcacacttgcagtttcacatgctggatttcaaaggactctaggcagcaacatgttatgtgtgtgtatggtagagaagggcatttgtagacaataaccttatggattatggatcatgaagggcatttttatcagttaagggcattcccattaatccataatcagtatacagttaaaaatgaaatgagcattgatagtagaccaggaagagtttaaaactgcataatatactttttatgaaatttccaatagcattaagtgcataatttataatccataatcagtatacagttaaaaatgaaatgagcattgatagtagaccaggaagagtttaaaactgcataatatactttttatgaattttccaatagcattaagtgcataatttatccaaaatatctgcccttaactgataaaaaggcccttcattatccataatctgtatcaatgttaattatttaaaaaatatttataacacttgtaaagcatttgttagtctaaaaatacttcaatttgtgtgttttgagctggctccaaccaccaataaagcatttgttagtataaattcttcaacttttgtgttttaacctggctcaaactggagtattcaaatcttcaatgtaatgtctggttatgggggtcctagatcaaaatttttggtcttgagaaagggaattaaaaaaaatggaaactgtgcaaacatacttatcatctgcctgtataaaggagatgaaatgtattacttttaatatttttctgttgaagaaggagggggggggtgggaggataaggcttttgttgttgtaaggatgggggatgttcttcctgttacataggactaatagtaatatcctgtgtcattcaagaaaattgatagccttcactggaggatgtgtactgtcaattaaatactttttttaaacatctttgtccttttttcctaataaaaaatgtaaaacaggcatttagtaaaactcctttccatacagacttcagtagcattgctgttaatttttatgaagattaaagcatttgctcttttatgtcaccaatttttattgaaaagaaatataattattcttaactttatattatttcagaatttttaaattacataaagtattttgttccaaaatgttgcttaattgataaattatcctattatataatcctgtaattttgtaaagtttcttgataaaaactcagcctgttccttcatcttcgtataagttgactcgatttgattgatatgtattgatgcttataccatttctatacctttctaattataacctttggttttaattatatagcttggtttaggatttgcaattgccgaacctatgctgtctagtaacagtgacttctcgaagttattctatgactgcaaggagtacataactactgcttgtcaaaacaacaaattgaatgaaaaagtggatggtctcgtccaggtgggtactcctagactaagtgacttatgaagttatatagcttctccctgaatccttgtgaagcctctctattgattaataccatgaaatacattgtcaatatgacatgtaatccagtggagaaatttattgctttatcctcgtatttgaacagtcattcactgtataaataaactcacaaagcagagtcctgaagaaaaaggaacactccaagactatcacaatgcgtgaaatttgtaacttttacctagcctaccttccagaactattcagtttgctgttttcttttttttaaaaaaaaaaaaaacatacaagcttgttgtgcaagataaccctacttcttaagcatggggatgaaaaatcattcccctggaaatgtaaattgataataaaactcttggttgttgatttatatctgcaactaattgttaataacatcattcaatagagaatttaatgttcgtattcctgtgtaggtatatgaaacagtggagaaaatgttattgaatcctgaagaagctctaaaaatgatcaagcagacagaggaatcaactacggttaccggtgaaccaaggagcccatttaggaggcttagccttatctttggaagcaaagataaactattgaggaagtctgtctcaaaagatcagacaaacgacgaagaaaagtcaggtcggcaatcattctctagtttctttgacagcaagtcatctttgtttggaaagaagcctcccaagtctggatccccatctccttctgagaaatcttctatcgatgctggttggacagttgtttagacaaatttcatcttccactgtgtttattgaggataagcaatgtttttgggttcctcctccccctgcagataactgtaaattttctctattcttttgccaaatacttagtggtggtattctgtagaaattttaattaatacttcattcttttttatttgagggaattgaaaatatagctttcgggcctttagtaaacattttatgtgttcactctgtgccaatacttgcaatctgctcgggtgttgaagatcctttgagatactcctcaagcttgcaactcagtaggaattcggtcatggttgacattaagttctcggtaaaaaataataattataataattaaaaaaagacattaaaaaatatatcctaatagatatataatagtaatgcttgtaattataaaaaaaattatagtagtaatgcttgcttttgggtagtttagtctctgtctaacagaatttgatctattaatataacagtataacacagtgaatttatgtttgagaaattgtatttggacatgaatattgttggaaaaagttaggaagggaagagagataataaggggggaaatattgtcataacaaatgtttcatgaatcatacaactctttacgttaatggtatgatcatgatgcccttgcaagtatttctatactaacattaacataaacataatcattgatggcaaatttctttagtacaaataaattgtattcttaaatatcaaacaataatcatattaatcctatgttaaataaagactatacttactaacatttttttcggggtagtagtaaccccagtgaatcaagggcaggaacaatttggtttcatgagattgtaatcgctaccaagtctagaatacctaatattaatgagcaaaagaaatcacacttggatgtttttattataatctaaatgcgaactaaagatacaaaagacacgtgcagtagtgcttcaaccatcatgagctcagttctcacatttacgtaatcctgtttcttccttcgtgacctcccttgactatctattcatcttctattgcatttacatcgtcaaccttctgctcttcgtttgatggcttatcatatccgaaagagttgataaggaaacctggcacgacaaaatttgctatgaagtatgccgatagaagcacagcactgcaatatataaagaaatctttagttaacttctagactttaaagatcacactaaactccattttggagtaaaaggttgttataagcctaagcctagtgtcaaattcaattataataatcatgaactatcaaataaataggaggaatgctcgcaatacattttttttttagtataccctcttttctaactcccaaatttattgcataagaagtcagacttaaataaatactaatttttaatgaattttagctaataatgaatgtgctagacatggtaatattagtaagtaacttttctccaagcaatgaaaaagggaaagaaagagattgaaccttattggaagcaaggtggacaagtcaccggattgggctggggcaacaaccagtaaatgtggaagtgccttggtacttagtggacttgctgaaggtaagtgctggccacgtggaggttggtgagtagtaagccaaaatagtttggtagtgtggctcatatgatgtaactgcggtttgagttttgcatgcaaaggaaaaggaagcagtgaaggttggaggtggaggcacctcatattgttcatgcgtgtcactgtgtggtgcttgggatattgggatatgcttatgtttgggagtgagtggatggatattttagtaaacatgtcatcctttatgtagggtcccatttttgttcatatgttctagacaggtttatataagatccagtgtatcattatttcgagcatattaaaaaatgaacgaataagcgtatagttatactgttatagtggcacgtagccaaatcatgaaaaatcctaaatcactaacttggatgattatctaagatggatgattatctaaaagtggaaaattctaaatttttaattagagtttttttaaatgaatagaacattaactttaataattactatgtcgaatgattatttttatatttttatttatttatgacttaagtttaaataaattaatattatgtttgttttttttttaaatattatgtgcatatatnnnnnnnnnnnnntgattatatatattttttgcattagttttaaatataactgattacatcaattatagatataatcatgaaaaagtatgacaaccaaacaggagatgtcactcgctgtatctcctcttgctacaagataaaaaaaaaaaaaaaaaaaaaaaacaagtataaagtactactactctgaatacttccacaccctacgtaacaacaaaaacaactggtgctacgtaaattattttcaaacttgtattatgaattgtacaatcaacaatccacttatgctaaataattaccatataacacagttttttacgaccgagtccaaattgcactcaaacttaaaaatctctcttttcttcctttctctcatttttgaatccgcgcaattccaattcacctcttcactccttcatcttttcgttctcgttctctgttcttccttttcagtttctagggcttattattattcgtttcgctttccgccaagtttctcgcgccctaacagtttttccccgaaacctcgcaccgacgcccgagaaactcgccaatcgatggccgcagaggaggtggctcctctcggcggcagcggcgattcctcgtcggcagcggcgagggttccgtcttcgttcgtgaagaaaggcgaccggaaaatgttcacggtggagctccgcccgggagagacgaccatagtgtcgtggaagaagctcgtgaaggacgccagcaaggtcaacaatggatccgcttccgcaccggagcatcgcagtcccaatgcgaaccctgcgctcgtgtccagaatcgctccggtgagcctctttttaggtttcaaattgttgtttcgagtaataatgtgtttctgaaactttcgtttagtttttgtgtgtttctgaaatttctgtttacgtacattgtgattcggtaagtaggttgcaatgtgtgagagggttactgtggtgtggtgtatggatgatattttgaattgtaatttgcaaaagtggtttttgactgagccgtgactgtgttttcttttttttccggactgaaataagggttaggaatgaggatagtgttattttttagaattacgttctgctaaaatgttaatgattgacctggcatgttgttatctgggaagtgcgcgggtgtttcttgtcggtttttgacaatggtttgtgctccgtggcagtgatcttaggtgaaattattcgaaaaggttttgtcgtggcaaagttgaattgtttgtggaattacttgtatttgacttgaaatttattaggtttatttaggttgaatgcgttatgcttattgacttaatttggattcgtgttatgccacgatgtttcttgttggttttcaacaatggtttgtgctgcgtggtgctgctcttatggataatcatttaatagggttttgtcgtgccaaagtcgaattgctcgcggaagtacttgtatttgacttcatatttattaggttgaatgcgttatgcctattgatataatgtctgtctgtttgtatttgtgttttggccagtgttatcaatggcagatggcagaagtctgaaattccgccatataaacatgccattgtgccttatggcgggcctttcttcacaaattgcctatggtggttggtaaaaaatctaccttgccattctgccttggctgctagttaacaacactggttttggcatggcataattgcgtcagcgctaaagcaaggaaatgttacttctacgctgattagttgacttgacgtgaaaatgtgcatatccggatgcaaatccaaacacagtaacacactattaatgtgtggtcctcttttaaatttggtgaaccgatggaacatcatgtcatttgcttttatttaaagtgatatattagtgtaattggagttaatgttatgctaactagtttcataactgaagccttagatttttctcattagtttaaggtagttggtaaaaaggtgatccagagtgcgaggctctcaccttttggggtctggggagggtagatgtacaaagccttacccctgccaagtggagaggctttttcccaataggtgaacccatgacttcctggtcacagcagcaacattactgttgattcaaggctcacccctttgttagagggcattgtatttggcataaaaatcaataaatcaatcagtattatttgcatgaatttttagttgttccatacctttgtcttctaccttcaatacatattcttatatgtagatgtttttattagctgaattttctttttgagattaatagatagatctgaataaggctctattatttgagaaacaaataagtttagcaaacatctataagttaataggctacagttagccagtatctggctcctactttcttttaataggacaagtgctgttgtttggattctgttcttataattcaaaactatacaatacatgtagtatatatctacttatttgtagcatgaaattatatggagtcaaggtaatcgagccttgaattgactctgtctggttttatgctacagtataattatttgtcatctggataccagcaggaattagcatattgtctttcgaaatagtatgtgactatgtgattttgtgtttcactattttaataacacttgtcacttttagggacaacctaaggagattgaagaacagggtgcatctcagacaaaccgtttcagtgctgtaatagagaagattgaacgcctttacatggtatgggtgtgttgcttcctgagattgttactcaatggtctgtacaaaaataaattggtttctactataaattcatatcatagatgcataagtattttattaaatttttcgagctattttccatgttgggaataatgggactctgaatcatttttagggtaaggacagcagtgatgaggacgatgcacctgatgttcctgatgatcagtatgatacagaagactctttcattgatgatgctgaattggttggtatctttttataccatattaatttgtcatgactcatgacattatgaccatttgacctttgattaatgatgacaggaattgctgaattgtattgtcctatattgttgccgtttcaccttgcatattttttatgtagttctactgttctttctgcagaatgagtattttgaggttgataattctgcaatcaaacatgatggattctttgtaaatagggggaaattggaacgcatgtaagtgttttttgtttgaatattttcggattatggcaatttcttatctttgtgagggctagcctttgttcaacactaaggctgctgccttttggcctggaggtcaccagtttgaatcctggaaatagcctcttcacttgtggggccaagtctttgtgcatcttccttcctcaaatcttatttggtgggagtagggtgttcaaaaactggtcagggaaaaaaaccaaaccgaaccgattccgaatttgaaaccaaatttgagaagtgatttttaaaaccagttcagaaccaaattggttttaaaaaactggttcagaaccgaactagtttcaaaaactagttccaggactgaactggttttgaaccaattgtaaactggttttaaaaccagcttggttcgaaccaaacttatttgaaaaaaaacaattgagttttatttaaccaaactggtttggttaaaaaaccagtgcagttcggaaacagtttggttcgaaccagtttatatgcccacccctaggtgggagcctcatgcactaggttgtgctctttatgtctatctcttttctttgtaaaccacttaattttggaagcctttgcactttcctctttttcagttgatggatataatactacattttcagtggaatatatatgcttgtgttgttatatgaacatgtaatgagatcatgtatcattcactggcatagtttgagtagtgacaaagactaatattagtgttcctgtaacttgttaattttatgcttgaaatgttggtcttgttacattgctgattgttggtctattgcactattgttctaaactttgaatttacttttctgtacctatcactttgtttgacttaaacatttcatcagttataacttaaggcctttattagtatttgatgttgtgaagttctttcttcctgttcctgataacattttttcttggcttatgattgaatattctttcatgtgacacctgtttacatatgttgtgccaacattttgaatctattaaattgtagtttggagtagataattttttcacacaaattcctgattttattgattttctgtttcttctttctatattaccagaaatgaacctccagtattgcctatccagcaagcaaagaaaagacgccgaaaagatataccgaagaatcctggagaaaatattgatagtcatgtatcaaataaacatgtaaaagttggcaatactgctgctggaaagactgcatcattacctgtgaaaaatacaattagttcctcccataatttaggtgtacccggtgaacattatgaagacattaaatttcggagtgagttagatgtgtctggaattagtttgaacaggaaaactgctgacactagaccaacatcagatcttcctgtttgttcgaaagtatcaaatgatgatgctcctgccgctgcagaagatgctgaaaaacagaagaccaaagtacttcaatctaagaacacatgtgataaatataaagatggaagtggcttgcttgatacttctcatcagaagtaccatgaaaaaagtggatctgcacattccaaatcccagcctggaaaaacctcaagtagtgttgacaatctagaaaagactggtcggtcgaaagataaaaatggcatcaatgaactgccagatcttaacttatccgtgggaaaatctgctagacaaacaccagtaagtttacgtagctgcttttcggttgtctttattttatttctatgttccagacggtccttttttagtacttaccctctttgtttcccccctccttctttcacccttcttttattttatcttattttcttttcttttgtcttatttcccctttatcttcccctccaccttcctttnnnnnnnnnnnnnnnnnnnnnnnnnnnnnnnnnnnnnnnnnnnnnnnnnnnnnnnnnnnnnnnnnnnnnnnnnnnnnnnnnnnnnnnnnnnnnnnnnnnnnnnnnnnnnnnnnnnnnnnnnnnnnnnnnnnnnnnnnnnnnnnnnnnnnnnnnnnnnnnnnnnnnnnnnnnnnnnnnnnnnnnnnnnnnnnnnnnnnnnnnnnnnnnnnnnnnnnnnnnnnnnnnnnnnnnnnnnnnnnnnnnnnnnnnnnnnnnnnnnnnnnnnnnnnnnnnnnnnnnnnnnnnnnnnnnnnnnnnnnnnnnnnnnnnnnnnnnnnnnnnnnnnnnnnnnnnnnnnnnnnnnnnnnnnnnnnnnnnnnnnnnnnnnnnnnnnnnnnnnnnnnnnnnnnnnnnnnnnnnnnnnnnnnnnnnnnnnnnnnnnnnnnnnnnnnnnnnnnnnnnnnnnnnnnnnnnnnnnnnnnnnnnnnnnnnnnnnnnnnnnnnnnnnnnnnnnnnnnnnnnnnnnnnnnnnnnnnnnnnnnnnnnnnnnnnnnnnnnnnnnnnnnnnnnnnnnnnnnnnnnnnnnnnnnnnnnnnnnnnnnnnnnnnnnnnnnnnnnnnnnnnnnnnnnnnnnnnnnnnnnnnnnnnnnnnnnnnnnnnnnnnnnnnccttcctttttttttttttttaacttcctcgtatctatcattgggctcatctaccaccgaccctaattaacttaggttaaaggtgctgttgatgttgaagaaggtttgctgcggcacttatatcaattcattcttgctattcagctttaaagtaaaggattctccattctaaaccatagctaccatatgaagcatggaactgcccaccaaataagcacttctagtagatcaacttccattgtgattaacatattacattgaagcatgacatgcattgtgccaggaaaagtgtgtgataagaaccttgggagaatcatattacaaaaactagccgttgtagttagagagctcaaagtcttataaacacaaaaccagaatcccatacttccaacatgagactcaagtctcataccttgcaattggatcctatcatctcaccatgattggcagccccgatgccccttcacgttggctatgcactagttctttgactagtcccaagcaaatactgcaatgttgtcatcatccacatcgctcgtttgcaattaacagacacgttgaaaagctttaatgcgaattgataagaatcctaagagaactacaccaccaaagctaactattgtagtgggagagccaaggtttcttactttgtttttgcatgggagtgggtgttgtatctgcaccctaaattgggctactctccaacccaagcagtcttacaatcgaggaggttttcttttgcctattatttttatttttactataaattattctataataaaaactaaaaaactaaagtacaccaaggtttcttactttgtttttgggtgggagtgggtgttgtatttgcaccctaaaccgggctactctccaacccaagcagtcctacaattgtggaggttttcttttgccttttatttttatttttataattaatcatatattatactatatattattctataataaaaacttaaaactaacgtaccccagtgcccaaaggctccttgctatgtgaaggtaggggagagggtcattatacgcaatcttattcttgcatatggaaagaggttgttttcgaattcgaatctataaccaattagtcaccaatgcacaactttaccattgtgctagagctcaccttgataaagtattctataatatttaaaaactatagaaaaattaatgcataatatatcatataatagagacaaatgtataatgcatattatatatcactaccttcgtccctaaatataagacttttttaactaattcacatccttgaagaaaatttgtttatttggttagcaacattaaatttgttttgcaatttgtattattttttcaaaattacccttaaaattatgttaactcatcatctcctttccacttaattacttttttcctaattaattaatgtgtcctagtcttctccaatccttgtaagagaaagaatgaatttatcttattaatttattgcatttattgtaaagcaattaagggtattgtggtataaaaaatgtaaaagacaacttgaaaaatgtctcatttaggggcagaggtagtgtatatattatagattattataataataatataaatatatataaataaaatgtatgtaaataaaaatgtaataattaaatattataatataatataataataagaaataaatataatagaaagaataaaaaatattttatatatacatatattaaaaatagcagtcatcccactattgtttttgggagtgatcccgtgactccatccactatggactattattgtgggattaagtctcataccttgtgatcggatcttaacagtgtagcatattgcttcaatttactccatttacttgttaccttggctgttgcgggtcatcctttttcattcaaaataatttctatttaagggatattggtatacatggttggtttttctttaagattttggcaaactatactatccatttagcatgcacttggtgagataacatgttcttattactatgacttctgacaacaaaagttgtgaaagtagactgttatgtgtttaacatatactgtgttgatcaagatcttgtttgaagcttatgcagaaatctgaaaatgtgctcaagaaagatggttctgttgctaggcctaaaacgacaacacttgagaaagctattcgagagttggagaagatagttgcagaatgtaagtttggaaaatgttttgaagctcacattataggcaatgtgggaagtttgttgctaatgctaaatttttattttaaatattattacagcaaggccaccaactatggaaaaccaggaggctgattccacacctcagggtgtcaaacggagattgcctagagaaataaagctgaaacttgctaaagttgctagattagcggtattggcaaattttgttttcttcttatgctaaatgcttctagatatatgcacaattttgtattatttttttctcaaaagtcttctcagtttgaacattgtattatcatattgtaatattgactatatgtttttgttgcagcaggcaagccaagggaaagtatcaaaggagttacttaaccgtcttatgagtattcttgggcatctgattcagctcagaacactaaaggtatttaagcttgataaacattatgagtatgtatttttcagtttccggttataatcccccaatgcttagcaggagctatatagcactaggctgcctttttgttgttgaacccaaaagttatacaaaatttaaaaattgaaactaattattgcatctctcaaatcacctatcttgctgtccagtccactatcctgaacttttgtacaatttgtagtttgtttagtgattaggttatgatttaacaataccatattctaggctttgaatacattcgtgacctaatcacattgtggtttgactgagtgacttacttttgtgaccttcttaaagattgattctcttttcttcctttttttttttttcctttaccctttttatggtgatttcaatgtcatatgtctgagggctcaagctagggtggacaatcctcataggtctcccacggtggtagatgattttttcaccattagatttgttacttctaaaatcaagcattcaattttttcttcttttttcccaatctgtccctgccccattctctctcactccatcttgttgcttcactgctgctgcgatgacacaagccactgtcgacatctctaccataaaccgccctaggatggcagaatgtctactgcaaccaccataaactaccgttacaaaccacgaccgaaaacaatcacctaaaaccaaaacaaatcacaacccaccataaacaataaagaaaaccagtatcaatggccttcgccaagtccaccagcactgactcaggcttccccacgcacactaccagattgaagctgtgtgcctagagtctctggcgcaggtcagagacggactcaaccagggctgtgtggcagcgttggaggcagactcagcgtagttagcctggttgaagcagtagacggggaggaaggctagggcttgttgttggtagtaatgaggcagttgttgcgaaaccagacgaggatggcgcaacagcattggagggttcgcattgcggtggtggtgggagcctagggagagatggtcatggagaggagagcgataacagggcacaggggatcttgggttggatgaagggggaactgatggggaaagtgaggctacagcaaatggagattttgcagtggaaaatggcgagggtgtcaagggcaaaccaggaaagataattatcaattataaaaaagaaaaagaaaaatgtagacctttgatttaaaagataataaatccaacagtgaaaaaatcatctcccaccgtgggagacctatgagggttgcccaccctagcctaagtcatgtctgagtctatgaaattcttatttttaagtgattgtttgcccacttccattttaataaaaactggttttccttcaggaatgaaggacctgtttgctttagactttggtgactccacagtgacagatggccttcctgaattgattctaagtgcaagatcagtatagattattttgggagaaatactagcttatttcctaaaaactctctcatgaagcaggcaaaaataagtaattatccttcaaataaattgaaccaaacatgcactaattgtaattgatcaagtttctcaagttcacatttttatatagaaatagatttaggaaaagtaaagctttgttgccttggtgagtagaacttgcgtgtgttctatacccacgctctttgtttataatcatggattagggtagaaagaatcaatcatggatacgaaaaatcaatctaaatccctaatttgtggtaatggatacactctttacataataaatgtttttcttctaacactaacagtagaagctggtgattttccaaacaaaaacaactctattcctatcactacaaaattaattttatgtcaagtggactctaattatatttcagaagttattcttcagtataaaaatcaaacaaactcaaccatgaactccgttcttttacaatccaattcaaaaaaaggtaatttcccacctattatttattgtttatgctgtcaatgaatttttgcaactatttttctctttgtttataatttatatttatatttatcgttagataggtaattttaattaccatttatgcttgaattgaaacttatcttctcattcaatgtcttcctgctacagagtaacttaaaaaatatgatcagtatgggtttgtctgcgaagcaggagaaagatgttaggtttcaacagataaagaaagaatttattgagatgattaagatgcaggccccaactatggaatccaaggtttattatagttacaattttctatttcattccatatcaaaatcaaatattcagtactttttgcttgttttagctggttcatgtagcttctttttgattccccctactatagttataattcatagtatacttattttcactctttcttatggatgcttctttatatcgattcaatgcaattttgagttttatatgcaaatccttattttggcatgtttacttatggataacttttacctggaaagggatttccttagttgtagttatgaaactcaatctagttttgttgatatatttcctgatgtttgcattgtatcttgattgcaattttacaggaaataactgtaatttcgattgattaatgaagattttggtaatttaatatgggatgctttttcatgttttcctgcatttcagctacagcagcaagctggagcatctggggaacaagaattaggtcctgatgggaaaccaataactaaaaggaatttttgtgtggacactgcattggaagacaagatttgtgatctctatgacctttttgttgatgtacagaagtttgaaccttaagtatttattttatagatcctgtgcggtttgaagtttgttcttaatgaatcttattttcaattgttccaggggttagatgaaaatgctggtccgcaaatcagaaagttgtatgctgaggtggttcaaattttctatgccttcctcgatatttgtttttaaatttcagactttcagtaccttcttcctttgggtttgatttggtttatttccttttctatatctcctagtttaagttaaaattactaaattagtactatctaaaatctcttctatcatttcttttcaataccatagttatcaatagtgctcaattgcggtgcaattgcagaggtgcagaacagaatgtcattcggatgtgacaaaactgccataggattctcaattattttttcacacatgtaaattttttcaattatgttgaatacattgaaaagaaaaggattctcaattattttttcacacatgtaaattttttttattgcaattttttccttcttttgagtcctcatgaatgaatctcttatttcagaagcttgtgttactttttgtgtgtgactgtgtgtattgcatatacattgcagtttctggtgtctaaattaatatgtttgcgttttctaaacatattttttctcactttcaagtgcattgtcctcttcagcttgcggaattatggccaaatggttacatggacaaccatgggatcaagcgtgcaatttgcaggtcaaaagagaggcgcagagcactgtacagcagacataaggtatgcctttgcaataaataatagcatataactatggtgtagtaatattctaaaatctctattaaaacaaagaagcctttacagtttacatgttctcagttttgaaaatttaagaggagtttcacgatagtaatttgtggtctagcctgcaaatacctatgtggcatgactaagttggaaactaaacaggagtcttttaatttttctcttcatccttaccttaattatggctttaaatagataactatgaattatgaatcagaagaattggagaatttgctttctgttttttgtatgtacagatgacaatcaggattttatatttgtgagaaggcttaaatatgtttttgattttatatatccctttttcagtttactacctaaatatatatttttatttattttactatctgacatttccaaacttttgcttttggtacctgtcgttagtctcggtcccttgagtgatgatatgacaaattaacagtcacgttatcacctaatggacttagattaaaggtaggtaccaaaagtatcaggtagtaaaataataataaaaatatttaggtagtaaactaaaaaagaagtatattacaggtatgaaaaacatatttaagtcttatgagaataatgttttttgttttctatctcactggttacttattgttaggatcaggagaaaatgaagaggaaaaacttattggcacctcgaccaaaggagaatgttcaacttgatcctagtccaattacttcccaacagcccatgcgaacaagattagctgcagactctagttgtcatactcatgcttcagtaaacaagacagtttctaatgcagtcaccgctgcacgggttcacaatccttcggtgaatggtcctaaacaagaaaaagcaaagggaagttcaagtggttctttggttcacgtcaagggtgcagacggtgttttaataaagaaggtaaagagaaagccggaacagggtttggaaggaactcattttcgccctgagaagatggcagcttctctgcaaggagaagaaaagcaaagatccctaaagcagtctgcaggtgctccccccaaatcaaaccttcagccaacttctttacctggtctggagcagtcaagctaacatgaaatcaactaggatgtttactcaacagaatgtattttacagttttttacccctatttttttttttggctcaattctcctctcccaaatcaattcatatactacttattattacgatttttgtatataggtagatttgttggttgttaagtcatcgcgtatttcttgagaaatgaagtcataggcacgtaggttcaggggtcaaaagactatccccagagcacttgtctcacgaacaaacatgcccccccaaagccaatgtagtatttctttctatctattattttcggtcaaaagaggctatcgttccttggctcactgttgatttgcacaattgatcatcgcgcttggttgaaaagctagtggtgcgaagctatcgtgcattggattatgacaggacgtctttaagtcagaattcgggttagaagtgatgcgtgaactcgttattcgtttgtcgaccagtagtagggggcctggaccctccaaaggcacgtgttgttggtgagcttcgtgggatggattagccctgtgagacgtcttgaagcacaattcccattgagcggtgaaaattttttcttgactatattctaatgaaattctataattactttattttttattataaatagaaacttgttccaaatattaataatattattggcatattgaatctggccttaccatacttcttgtagatagtggtgcttctgaaacaagcttgaaattttgatgaagcagacacaattaatcttaaatttttagtgtttcataaaaaagtgtcatcaaattagtgatccaaatatctaaaatatcaccaaggtcattatagaggattaaagaagtgaaaaaggaaatctaaagtttaatttagtaacaaattaaatctttaaaagaaattttaaaatattaacatttttgtttttatggatgattgaagtggtgataatataatttggaagggactaatttaatgactaattaaatatttggggattaatttaatgactatttttttggggtaactaaatttgtagaaaaaggtttttggaaaatataattcagttaagatttttgaaagattataattattatagatattataatgatgatgtctatttgtcttcgtattttttagactagtatattctttaaataacattatacactatcattattatattttaaatgcatatgaaagaactaacccattaattacatatnnnnnnnnnnnnnnnnnnnnnnnnnnnnnnnnnnnnnnnnnnnnnnnnnnnnnnnnnnnnnnnnnnnnnnnnnnnnnnnnnnnnnnnnnnnnnnnnnnnnnnnnnnnnnnnnnnnnnnnnnnnnnnnnnnnnnnnnnnnnnnnnnnnnnnnnnnnnnnnnnnnnnnnnnnnnnnnnnnnnnnnnnnnnnnnnnnnnnnnnnnnnnnnnnnnnnnnnnnnnnnnnnnnnnnnnnnnnnnnnnnnnnnnnnnnnnnnnnnnnnnnnnnnnnnnnnnnnnnnnnnnnnnnnnnnnnnnnnnnnnnnnnnnnnnnnnnnnnnnnnnnnnnnnnnnnnnnnnnnnnnnnnnnnnnnnnnnnnnnnnnnnnnnnnnnnnnnnnnnnnnnnnnnnnnnnnnnnnnnnnnnnnnnnnnnnnnnnnnnnnnnnnnnnnnnnnnnnnnnnnnnnnnnnnnnnnnnnnnnnnnnnnnnnnnnnnnnnnnnnnnnnnnnnnnnnnnnnnnnnnnnnnnnnnnnnnnnnnnnnnnnnnnnnnnnnnnnnnnnnnnnnnnnnnnnnnnnnnnnnnnnnnnnnnnnnnnnnnnnnnnnnnnnnnnnnnnnnnnnnnnnnnnnnnnnnnnnnnnnnnnnnnnnnnnnnnnnnnnnnnnnnnnnnnnnnnnnnnnnnnnnnnnnnnnnnnnnnnnnnnnnnnnnnnnnnnnnnnnnnnnnnnnnnnnnnnnnnnnnnnnnnnnnnnnnnnnnnnnnnnnnnnnnnnnnnnnnnnnnnnnnnnnnnnnnnnnnnnnnnnnnnnnnnnnnnnnnnnnnnnnnnnnnnnnnnnnnnnnnnnnnnnnnnnnnnnnnnnnnnnnnnnnnnnnnnnnnnnnnnnnnnnnnnnnnnnnnnnnnnnnnnnnnnnnnnnnnnnnnnnnnnnnnnnnnnnnnnnnnnnnnnnnnnnnnnnnnnnnnnnnnnnnnnnnnnnnnnnnnnnnnnnnnnnnnnnnnnnnnnnnnnnnnnnnnnnnnnnnnnnncttttaaatatcaaaagacttctatgatttttggtaattttaaaataaaataagtagttttgtgatttttggtgtgtttgtttaaactatttttttaatatgcaagtcgttcccttttaaaaaatgagccttacattaattttatcaaaattaattgtgattaactttaaggtttaattgtaatttttaatctcaacttttatattttggcaaattttgcctctaataatattttgatgcattttactctcaacttttaaaatctttcaattttgcttccgttccaaatttcactaacatttttttggccatttttaactatcactgaacacacctatttaaaataagtatctttaacatagtaaattagtaatgactaaaaaacaccattattattattaagtccaccatatatcaaacaaagacaaaaaatcagagtctaatgtatataactcattggtgctaaaagactaccttacaatgatatactaaataaaagggtcggacaaaaaaagtttcaagttgaatatcagttgacataactgataatggtttgcgttattaaccaagtgatctaggtttgaatcttggttggcccttgggtatagaataaatattgttgggaagagaatacccatcttgtgtgcactcatggttcccgacaaaagttcgtctttgctttcgatgagaactaattcgtaccaacactatggccaccaacaaaaaaaaagttgaacaacaattactatttattggcacaaatgttaccaaatcctaagaacaagagggatggagacaacggtgaggccactatggatatccaaggttactttgtgactctacatagtgccaaaactattacagggaacgatcatggatagatgagaaactggttttgcctggcaacaaattgattttcaagtgatgaaacgaatatctagactttaattttcgatcaaattcttctagcatagctctcacccataattcatttcatctatatttttttgttctactccttaagcaatgttatagatatataacttcaatattttctaaagtgagttggagcccttactcctccaaaaatttatcaaatgatctcataagatgaatagcttctagcttcttccattttctccaatcgttcgctctctattgagaagttagaggtttaaactgtgacatcctagatgctaacaatggtgaggaatgatcatcgatgcacaagagatgtgtcacaaacaaagagcgactcctaacatgtttctagcggaagggatacatgaataaattgaatatatacccagatgaaagatatttagagattgtgtaggtctgaaactgtacaattaaagatgacttatagaaattattactacctataccaacaaaaaatatatattttttaatagtttataacttaagaattctacaattaagtgtgtctgatttataataattataagataaatgataaagaaattgtttgatgactcaattttttaaaatcaaaatgattaagttttagatcacatttaaaataaagtttaaacaatcaaatcacatatttattaatttaatcataatttagtattttttatttttatttttggtgcgtaagtttattgattattagttttttggttttggatatattcgaaacaatccgctaatggatttttcaatccaagaagtcagatggattagttttattttaaaaattatgattaaaatgaaatttaactttgtctaactcattttttttatctacataagtactctgacaaataactagaacattccatgattgattggaaatataaaaaaatacaaaatttaaattaaaaaaaatgaagaaaggtttgatttattgaattagcaacagattattttatcagtaaaaagatatgaattaaaatacaaagattcagacgttggaaactactaatttcgaaaatatcataaattgatttgattgataaaaatgcatttaaacaattaaattagagaaatctaaatattatttttttttccaaaggtgaggaagaaaaataataatatttaaaatttgaaacacgcgatatttgacctggaaaatagtattttcaagacagtaacgaaaagatagggaaattagacataagaaattcaattatagagagcgaatataatactattgttcttcagaactctgtaggcggcgatctcctttgtcaccgttccatcgtcaaccctacccttctatctgcgtttggcgttcaggttcgtctctctttcccgagaaattagcttttctatttttttcgcagcgcaatttcgcaaatctgcatctagaacggttgaatcgggaaaatacatcgcaataggtatattgttgttgttgctgttgttgttgttgttgttgttgttgttgttgttgttgttgttaatattcttgtttagaaacgtaatgaatccgagacgttatctatgcaagcattttccgttcagtcttattttttttttttttttatggttttgttggttgaatttgttatttgtcaaattaggtttgaagtccgaaggacgaagaagagatttctgactgcgtaatcatgtttggtgtcgtaaggcgaagggttgcttctggcagcccgtttcctcgggtgagagctcggtcttttctaaacgcttatgaatcatgatgaattttcaatttgaatgtgtttgtgttaatccacagattgaagtttaagtttaagtcatgtttgatgcgtgttctgcatttgtttcagttgcttggtcagtcagttcagaagattcggtctggcccatcagtttctgctagagcttcttccattgcggaaaaagaggtggttgtctttattttctgcatatactctgttgatatgttttttcttcttataacttataagatactgatggttatcggttctccactgttaacactgatggttactcaactattatgtttaggagatagggttatgttgttagtatatgcaaataaggcagtgctcacttttagtccttcaaaataaaattgttcgttttgttcttggtggcaaaatgagactattttattttgagtgtgtaagagcgaattatatttatagaaactaaaacatattaaccctttgggatatgtgttaaatgtactacctggacaaatagaatgtgaaaatattgggtcgagtccttggtggcaaattcctaatcttgcttaattgttgtaattgtttttgataaaatttctttcatgacctgaaaagactctgatgctcatctggtttgtccttggtggcaagttcctaatctggtgcatttcattttctaactttttattttttgacgttgaaactatttcctacatctatggcttctggatttttcaacagtttgaaaagtaattggtcattgtcatttctgtttatgaccttttttctcttgtgtgttgtttgaatcttgttcaaaatgtggttggattaacatatggttgttcaaattcaatgtgatagagtaagtttactttttttttactcaattatatcagcaaagtatggcaattactaattgatatatagactgcctgctttgtgtacagactacacaatgtaaatttcttgggnnnnnnnnnnnnnnnnnnnnnnnnnnnnnnnnnnnnnnnnnnnnnnnnnnnnnnnnnnnnnnnnnnnnnnnnnnnnnnnnnnnnnnnnnnnnnnnnnnnnnnnnnnnnnnnnnnnnnnnnnnnnnnnnnnnnnnnnnnnnnnnnnnnnnnnnnnnnnnnnnnnnnnnnnnnnnnnnnnnnnnnnnnnnnnnnnnnnnnnnnnnnnnnnnnnnnnnnnnnnnnnnnnnnnnnnnnnnnnnnnnnnnnnnnnnnnnnnnnnnnnnnnnnnnnnnnnnnnnnnnnnnnnnnnnnnnnnnnnnnnnnnnnnnnnnnnnnnnnnnnnnnnnnnnnnnnnnnnnnnnnnnnnnnnnnnnnnnnnnnnnnnnnnnnnnnnnnnnnnnnnnnnnnnnnnnnnnnnnnnnnnnnnnnnnnnnnnnnnnnnnnnnnnnnnnnnnnnnnnnnnnnnnnnnnnnnnnnnnnnnnnnnnnnnnnnnnnnnnnnnnnnnnnnnnnnnnnnnnnnnnnnnnnnnnnnnnnnnnnnnnnnnnnnnnnnnnnnnnnnnnnnnnnnnnnnnnnnnnnnnnatttttttcccactgttacttatggtctttgttatagagggttagattttagaatttatatgttatttgtatcctttgaagtttcttacaactattgttttattatgattaacagattgcatttccttcaggcggaggtggatttgtccaaaacttcagtcatataacacttggtaattttgggtacattttattttaattattttagatgctgttgacttaattacttgaatgatttatgcaattttgcaatttaaatcataaattttgttgttgttgcaggaagctggattaattcaaagcctatgaggttcgtggcaccatttaatagtcctaagcattgctttaggattctctttaatttatgtaaaaaagtttggctcagaaataggatagattgtaagggtgctcttggtttagaattttggtgtctttaatcttttccttgaaaataacaaatacaattgaaaacatgttttagttatacaaaagcttaaaattagctggagtctggaaacttaagatcaagctctccaaccaggctttcaaatgttagaattaggtacctttggggaggggttaatttacatgtatttcgtctttggttttttctttttgcgcgatctgtcagaactttgtcggctttggtataaagccatcaaagttctgtgtagattccgctgttttgtatcttcagcagtactccttgtactgttttatatatatatatatatatatatatatattatctttgctgataaaaaaaaaaatgttagaattaggtttggaagcttcaacaacaatcttattgtttaaatatagttagaagttagaacaaaaataaagtaatgcagaaatgtttactgacttcaggaggaaaaaatggattggtaataaaaaatatagtaagaaaatgagaatatgaaattgttttcaaatccttagccaatcaaatgattcgaatccttaattttagtcatgacaaatttggttgtactaatatttccttgcctttttcagtattatttagctgcaaattttactctttttcttgtatgttgctaatgctagcttatgcacataaacattcatatcatgtggtcatcttcttagaaaaacccaagtatttaaatttattggtgttattaagggaattgaatgtccctagatgcaaatttgaaatgatttttttttccaagaaaaaaagtagacactaatgcattttctgtattcttctatagttttatttgtactcgatcaaattctgttgatgatcttttcacatggagttccgggggtgcaataatgacaaatcattaattaataataggatggaatggaaaatagttacaatttcttatccagtgatgctgttctgatattgccttattgctctgtagggtggtcattcatccagaggcaaccgttcgaacatgggggcgtctattttcttcagaaagtggtgagctattgatgtgacactattgccttattgccctattgatgcgtctattaatgtaccattcatttttctggcatttacattgtttagttaacctgttttattttggctttcgattgctaatatttttaagattgctaatgttatttatatttgtgataaaggagatacggttgatgttgtggttcctcctttggctgaatctatctctgatggaactctggcacaatttttgaagagtatgttatcctgtatatttttttcatcatctatttgaattgttaatttatgaattattggtgactgattgtcgtgttttgatttgttatatgggagcaggacctggtgacagggttaatgctgacgagccaattgctcaaattgaaacagacaaggtgctatgtcaaagcaacatgcagatttttgtgaaggattttgatggttataaacatttaattttcttgatttccaaataattaatgctgtattttgtttttattccttaattaggtgacaattgatgtttcaagtcctgagtcaggcgtgattctaaaggtacagtttcatagatttaaattgtttttactctcctcaaccaccctgaaatgaagaaattgttactctcttttttctcgtttcccttttattaaatttggcttgtgtgatctatttaatgatttgcagcttctagccaacgaaggtgatactgttgagccaggtaacaagatagcaatcatttcaaggtctgctgatgcaactcacgttgccccatctgagactacatctgagaaagctgctcctcagccaacccaaaaggttagcgaggagaagaaagctcccaaagttgaaactgctcctgctaaagagaagcccaaagcatctcctgccattctgaaatctcccaccgagccccagcttcctcctaaagaaagagaaagacgagtgaggcattttgatttttggtcctacctgaattatatttagcaaccatgaaagttgttttaatgtcttccattgttatcaaaggttcctatgacaaggcttcggaaacgagttgctacacggctgaaagattcccaaaacacgtttgctatgctgacaaccttcaatgaagttgatatgtaagttttgttgattgtcaaattgtagcataagattttaatattgctcaaactgtttttttaccccatgtgtataaaaatgcactattacattatttggtgatggttctaatggaacacagttgtctaaatttaatgaagtgctcaacgcatggtctgtcctctacagctatgatacattggagagtcattacatttctgttaatttttcttggtctttgtcagatcaacaaacctgttacgtattctctcaatttctactttccgtagttggtgtacatttcttattttttttgtttagaagaaaatagggcaacgattgactatatgtattggggttgaagcctttttcacttggatttatgcttagctttttgctcatctatgtaattttacattatgccactgtgttagtagtttctatgcgataacacccagtatcgtgggatattctgttgattaaatgagggggagggggagggggaggaatgtaattcagttattatgtagacttaatcaaaaagagtgattccatgtgtttaattgtcaattcttgatgttgtgtttcctgtcatatccttatatagtggattactattatcattctcttattgctctgctcttaatgataggactaatttgatgaagctccgttctgattataaggatgcttttgttgaaaagcatggagtcaaattggggctaatgtctggctttgtcaaagtatgttttctaattactgaagtatagactagctgggttttccctttttgatttcctcatacactttttatggtctccatgttaggctgctgttaatgcactccaacatcagccgattgtcaatgctgtcattgatggtgatgatattatatacagagattatatagatatcagcatagctgttggtactccgaaggtttttatcagccacctttatcttttctcatttactttgtttacgttgagaaatcaatcaatcattatactgtcttgatgaaacttagccatctctgtgatcaacttatgtcaactattgtcatggctatggagctaatttactggtgatctagtatatgttgtctaattttgcaattttttgcatggccatgaaaattatcaacatgcatgttgtatttgaacaaatattgacccccaatcgccattccagggccttgttgtaccggttatccgcaatgctgataccatgaactttgctgatatagaaaagcagattaatgcttttgcaaagaaggcaaatgatggaactttatcaattgatgagatggctggaggcactcttacaatatccaatggtggtgtttatggaagccttttgagtacccctattatcaaccctcctcaggtttggaagttatactaagataaataccattatatttttttctttaatttgtaagacattcttcgatatgttttgaagttgtttctgtatgtatatgattgtacataatcattgattgctttccttttatcttggtaggttcaggcattgtttatcatttaatgaaaatggtcgttatttttgtcaccagtaactcttcaatatgcaatttgttttcacagaaggatcagtttaattctaaatatcaagccaaatactctgatctattcccttaatagttaaatatttataattgttttttttaatgatgctaattattgtgaacaataaaatatgaaattaattatttagaaagaaaactcatgcagttattgtttttggcagtctgcaatcttgggtatgcattccatagtgagccgtccaacggttgttggaggaaatattgtcccaagaccattgatgtacgtggctctaacatatgaccacagaattattgatggaagagaggcagtgttctttctgcgacgcatcaaagatattgtggaggatcctcgcaggcttctgctcgacatatgaagtgaacctctaattttaaatggagtaaattaaacctcaaaattcaaataccataatgggtactcttttgtttaggttttgaattgcggctgcccgtaatttataatctgtaatgagcaaactctttaggatcatatcccaatttcccttcgatattaattcagcatggttgtgttttttctacccactattcctctcatttaatatgaagagggtcacagttttttggctccaaaattgtatgaaacgactatgaactatactgtagggattgcccctggagtaataagacgatttcttttcatggcactttattcttacactattttttagcggatgaaaattttcagatacatatcatcatagggtccaagaaagcggggatgatataatatggcaataatacactgccgtaattaaattccttctagaattcccgggtttttatatacgccacatcgaatgtagcctctataagttaataattctcatgtgaaaaaatgcttttattttatttttttaattaagagcttaatccaaaaaaatatgcatagaattcaaaatgcaaattagtttgtttgctgggaacatgaaaaatggttgacgagagatgcatggtgataaatatatgaagagtggtttcattctatcattctaaataataattgtatatcaattattgttagttgtcttctcaacattgccaagcttcaacatacgtcctttgtattgctcaggtactaaaactagtatatattgcatataatatgcttgtgtaaattgcaaaaaaatcagggtaaaaagtcttggatgatcaaggcaaggttttatattctcaagaaaaagtgaaaagagaggtaattgataattgaattgggaaggtagagatcactcaagcttgcaggccatattcagttttattctcatctaacgtgttgggactgattcctcttgttcaaagttattctgtgcctgctgcggtcttggaacggaaagcatggcataattctttgcctaaccccacaagtctccaaaagcagcttataaacacatggtactcaaagtcaaaataaagagtttatttttcatccaggctctcatcttacctccaccgcagaaatcaacatttaagaagttctacaaagatgatacaacttttattcatacttttgatgatccaaatagcattcatcttaatattatcttttgcaaatccaatacgaaaattggtgatcatggggctagacctcttgaagcaggggaggggcaccttagtcacaaaaactgtagcagcaactatgtgtgtggtcttgagctccaccgtgtatactataatcaaaatccaaaagcgttccaaggatgctggcatagttaatccaactgatgaggtgttgatggcacatcgtctcttggaagcagctttcttgggtaattactcaaaaaatacattccttgtttgcttacaaagttacaatacctgcattactattttgttacacacaatagaaagcgaacttacttaccccacgtgtactagtgtatgcatctgtttattttcataacttctctgaaaggtgacaagaaggttgaaatcatcaaaatttcactatggaagtttacaaataaatgtttctctaggcttgactcgtggcaaacagaattgagaaatgcccaccaataaatttctctattaattatttgaagaggctatatttatagttttgaatatgtgctaactaaaagtagctttaacatattttgacatttttttatcggcaaatgttagttactaataattaattttttattagttaagagattcaaacctacatctcttccccttttccttttcctttcaccatcaaaccaaccttataatccggttttgttagcatattttgccattactcatgcttggacaatgcatttaattgagaaatgaattctatcaagtatcaatgaatatagatttctctttagcacttctgatatactattatgtgcagaacatgagttttaaatcctataaaatggtaattattgggcaggattctctctgttccttggattggtgatcgacagacaacattactatattagagagattaatttactgaggaagaacctggaaacagttaaaaaacgaaatcacaaagactccttaaagagaatagtggaaactgagaagtcccaaggtcaagctcaagtaagcggaaagtaagacacagttagcacataaccaatgtcctgaaaaggaaaaaatctgaaggaggagaactgtcttaaagcatgaagatgttgcatgtcctttgtatgaatgtgcaacgctcagaattgaattgaactgaatatgcatacataattgttctaattgtgtctgtagttcatataaatgatttattttatttttatgtaacaattactgaatataaataagtttcaaatttgaagatgtgcgagcattcatgaattacaaaaccataactggtagacattggaatatcatgtttgttataaatgacttcagagaggacatcatatgtaagaatttgtcatttttatattacatatttaaatgatcgatataagtactttaaaatgtcttaatctaataatactattgaggcaaatgttaaccagtgctcttagattatgttgtccatgaccttttttacgcactcgaatggtctccacaataaatacttctccttttagttccttcaaccactgtcagccaacaaaaaccaggaagttactcggtataatgttctttctcatataaaattaacatgctttgctactaacatagaaagtatcaaaccaacatcatatgtaactgcaacatcatataattcataccaacatcagcttgacacaaacagttgcacatgaaaaccttaataaaggcttaaatacttattttagaatgacaaagatacgaacttcaaagcaggggagaggtaaccaagagaccccatccacaatctattacaacaatacttaatccatttcaggttggtaatctattggctgtggtgactttgctggaggcacgggaggaaacaatggtgatggtgatacggatactgttggtgatggtgacaccggcggtgatggcgacactggcgttggcgttggcactgcttgctcaaaggcacacaatccaaatacacataacctcccaagggggcatgctcttccacacctaccacagttgaaaatgttcacatttgtgtttaagcacaaacggttgcagcattgacgattcaacgtgcacctaaccccacaaagcccacaattttctctgtctgtagtcacatccacacaacggtctccacagcatatagaccttggtggaaactctcctctgctacatatcagtggtcttcccctgcatccaatgatttggttctcatctttctccatcaatgatgttgatgaagatgaggcatcagtgccattctcatggacttcttttggtgttggatttccctctattttgatcagcaacagcaccaccaccaatgttacaagagctgaagattgtgctcttagactcatcttgaggaagtggcttgaagggtagcattttggaaccatatatatatatatatatatatatatatatatatatatacatacatacatacatgtttatgtgaaggtaaattgcttttcttacaagccaaaggggcatgtttttcttgcatgaataacaaccatggtcttgatctcgtgttatgggcggtggacgttgtctatatatgtgttcgagttacatatacactagaaggaatattttgtcagctagctctgtgctttttgcataatgagttgagaggcttaacatttgtatgttgatcctcaaaacaaggttgcgtgatttaggattgtaaaacatgatgatgaatgcaaaaccatgaaatgaactgttacgttattgaagggaactgattcacatgaaaattgaaatgcctttctgaaaagattgtaactacctcatgaatctccgtatgttatttgtgatttattagcattgaaaaacatgtgcattgcacgatttaaaaataaataaaaagcaagaaagaataacaaataagaaagcaaagtgaataaaataaaactatccagacgacatgtgacgacgatcggacagttttaataatactatttatgagtctcaagatttcgagtgcatttggtttaatgttagattaaacagacacacattcccatgcacattttgtgaaaagttaaaattcaaaacttttaattcaacggccgtttgagacattccaacgttaaaccaaccacgcacttcaagcttatttttataatattattgacgcacctcaggacttcaagcttactcaattctgtttgtagtccattgtaacaccttatgtgctcagctgaatgttgatacttattaattttatcttattttatgattatgaaatcttaagaggaaaaaaaaatagttttaaactttaagctttagaaagcttaaaaggaaacaattaaaagaattgcccaaattccctatgacatcagttaaatatgtaaaaaggaaataatataaatagatcatataggatataaggtattctctctaattttaatcacccatttgtatcctttatgtactgacttagaacgctagagtctttacaagtacatcaccagaatttgctttgtgcgtgttgaagatattctgtccgaatattcaagatgcaagaaccggtgctgaatactactaaattgacgatgcaatgggtaattaagcctaaattaaaatacttcagtgtttttttgaggaagatacataccaaatcattaattgctacattatacatcattaattactgaaagcgtttgagtggcagatgtccctacatgagatgagtatgtgccctgtcccaaaacgcaaccaacttaacatgaattaaaaattaaaaattaaaaagctctgcactgtctaaggactatgatcaacttgaagcatgtaatgatttcttttttataagcgacagcatacaataactaaatgacagaatctaaaacaacatagtactttgacagcatcatggaatcaatttgaagaccaactcattaaacaatctattgatagcctctatgatttacaacattaatccatttcttgtactacaacacattcttaatcatattaaactaatcacaaccaattctaacaaaatctgaaacaatcaacaattcataatcaattctataaaaatctaaaaacaatcaagcactaatgcacagccaagaggcattgaaaaaacatcaataaaaataaaataaagattctcgccaaattcttaacccataacaacatttactacaaagggaaaccagaaatacagcaagtgaagatttcatccttaagaactactacaaggacaaacagataactgaatttattatttctcacagtcaagtcaagcattatgatacatcatacccctaaacaccaacaacagtactcaggtgagcagttattacatcgtactttcacatgaacgcgtcataaaggcagataaaagcaaaaatacatacaacacacgaccttaaggctcaagcacagcacactactatgtgacttaaacggtgacacaattcagcaattattcttaaagcactgcggatttgctgaatttgctcataatgttagagccttgttactgtagaaccacacattcttgtgaaccacccaccaccacagtagggtgttcgcttgtgctgactgcatcagcttctttgacactttgaacattgacatcctccaattcaccacagccaatggcttcaaaaataagatcattgacttcttgaaatctctcttgagagagggacacctctgcaagaagcctccaagcattgccttcagatgcctcatcataatccttcttcctctttagaaccatgtgcccactaatttcccacacagcaggattcacttgggtgtcaaggagctcagcatccacttctccaagagcttgtttctctgcataacactgttcatccatttggtaaatacccccacacaactaatgaaaatagattagacaaattcacttgcttcaagaattagtttacctgtggtaacagatagacttgctttccacagtcagagataagaacattgaaaggtatgttgttgttctgaagacatatacaggcatctgaaacaacatttgataaatcttccagcgtatcaccaccctcgaagacgagacctctaactggataattcaacagttcagatatcttcaccccaccatttaaacttgcaattttcttagtgggggccttctcaattgggaagggcagagccaaataataagcctgcatatatattcatgccaaaatcaccaaattgcaatcagatttgtagaattaaacaacggaatcatcaacacgaactattaagtggtataattgatcagcttccagtacctggaagtgaagatggttaatggttgcaaaagcacccaagctgttgtaacccaatcgaaaatatggattatcagcttccactgccatgtgaagtgcaaggaggaagctctcacggtcaatcctttggggcaaacactcgaaaatgtgcggaatcagcaaaacatgtccatactcgataggactgacctgttaagaaaatcgataaacaaacaaaaatcatcatcagttattacataaaacgcctaacaatgaacccacaagaacaaaagctagtgtctatacattgatggcaacaaagctgggagaattgtcaacatcaactggagcatttggaaagaactggacttgtgcatcctcgctagcttcaaattggaagaggacctcttcttgcccaactttggtaaagttgaatttgttttcatcaaagggttgaaggaccttgtcaactcggaactcagttggtctcttcttgaggtgacgaccctcattaagctgggcaacgaaaccatattcaccaggaataacctacaacagaataaccacaaaacacatcaaactcagaaatcataccatccatatatctatgcataggaagacaaaaacataacaaaacagaccttggtttcacaggcggtaacatcatagcggaaaagtcctttctgcatgcgatcttcccactgccatgaaagggtaaaaaaatttagaaactttaacacaaagggtaacaagaaaagatggtgttaacccttctccatgagcaaaattccatatctacctctccaagaagaagtgagtcgaggaatgtgaggggaggctctccggcgcatgcatgcagggccaaatcctttccattagccttcttgaaagcatacaaaggaagctttgcatctgttaacaaagcaaaaaacacaaataactaaaaaaaaaaaagagccatgtataatggatccaactcaactttagagagttattgatgacaaaaaaaaaccgtgaatgttacatgcacatgcatatatgagttggagaaagaaaaaaagaaagaagtacctggaatgcaacaagctttaaggcaattccgaccacaacctccgacgggacgaggagattctgcagcgtcgtctttttggtagttggaaacgacagtgggaaccctcttgagtctgagcatcattttgtgaacgaaagtagaagaagaagaagaagaagaaacggtgatcttaactagtcacaaagtctcttgtttttttttttttttttttttacttatttaagagtatgtaggctaaaagtaataaaaagagtgaagaaactagaagacaccgccaccagcgaggaagagcaagtctgaagggctaccaccttcagaaggcaaagcaccacgcccaccgtgcggcgaagggttggcggaagttacgcaactacccgtcctccgtcgtacagttgggacatgaatgagggagcgagagactcttagaatagccgtgatgtctgcaacgcttcaacccggggattcaacccaacaaaaataatgaataatcttgttttgcttctgtttttggcggaggagtcgttgttgagagaaccaacatgcagaaaagagtaactaactaaactagctctgctttggtggatgtggtgtgagaggatgaggtgcctttgtttcttgttttatagataagagaagagagatgtggtttaaatgtggccgtgaataatgcgtacggagtgaaatgaatgaatggaaagaaaaaaattgccttggtggaaaaataaacagagtacgatagaagagacaataattgaaagagagaagtggcttcacttttttgttcgcctcgctagacgctagtggaccactgtgctgtgctgtgctgtgggcgtaaccaatgggcgatagattaggtatttaggtatttaggttaggcccgtttcaaggaatcttggactccagaatcttctatcggtatattcattccactcatattttacacttaatcaaatgtataagtatgattaatcttctgttacaaatagttaataataaataaatgtagataagtgatttataatcttatgaagttattcaattaaaatgtttttataagaaataagtttcaccgtaatttttaagctcaaatttatttcttatattatataatactttatcttacaagtgattaagaatgttattcgttttagattgctgcacatgattaattacatgttcaaaatatggctattttttcctctcatcataagtagttaagagtgaagattattaagttattaaaatatctaatcatgattaagtttctctaacaattagttaatagaggatgccttgtacgatggactactaagtaatatggtctatggtgatggcagaagtaggaattttattgagggtacgaacataaaaaataaatatcataaataaaaatattttaaagataatacaaatataatatataaaatatgtaaggatgagttgatgaacaagcaaacaaagtttaataagtcttaataaaataattcagaatttaaaatcaaactcaaagtaataatatggagataaaagataaagaagacataatcagttttagcatagaaaatccaattggataaaaaatcacgacatccaaattggataatcaatccaatggacaactccactatgataataaataagtatctttaaatcctgatagagagttaagaatcagacttgtcaaaccttctatacgatctcataacaattctatcaatgatgcaaacataaacttgtaaagttttaatattatttggaatggaatgcatactataagcacaaaaatatgtttctatttatattaatttaagcatatgattttaaccacttttaaatataatcctaaaaatattctatcatattatgtgatgcaactttaaagatattttatattatgcaatacaatcttaaaaatattctatcctatttttgaatacaatattaaaatatattttattttatatttgaatataatcttaaaaaatattttatcttattatgtaatgtatttttaaagatttttattatattatgtaatggaatattaaaaatatgatatcttatcttttaatataatattaaaaatattatattttattatatttatattattcaatataatctttttttaatatcaaattatttttttaatttttaatatatataataaaatttatattaataaaattttaggaggatgtgagctacctgacctctcaatccacggtggactactttttatagtagtatgtaattacaatttaatccttgtgacagtgacttacttctatcctttttgcttttttattcatccctcatcgttggtctctactattctcaccatctgcaacctcaaggaaggactcactggtctcaccatcggaaacactatcgttgtcagtctcatcttcctccacgaaaatgacatcaaaacacttttgagagtccagatttcggggagggggaaagaacgactgaagagggagagagggtagcgtgtttgcgaaaatgacctagtttttttcactatttttggatgtcataatgctttgagtgataatgatatcttcatatttgttaaatttcggtgttgatgctcgtctctagtttttaatgtcgttatgtcaatggttttgaactctcacttttagatggttatggatctacaagtttctctcagtcttttagatgatggtgaatgcagcaaattgaagagagggaaagaagaagaagggaaaataaaacaaggtagtgatgacgctgccaatgacggcgcacagcgatcgagagaggaaaaggaccaaggaacaagaaaaaaggtggtgtgataaaagacaatataaaatataaattgataaaaatacttcattttaaccgtttaatattttgttaataaatattagtgaaaaattagttgtcaaccttaaaccacctaactcacttgatcaccttagacattgtggttaatagagccataagttattaaaatgtttaatagtggttgattttttcccttgtatgttaataaaaaaaattatgcatacaatatcggtaccaagtattcataagaatcaaatatgaagtcttatattcaaagggacaaaattaatactattagaatcaataacttattagtttataaaaaattaatgataattatataacataattatatataagcaatgatacttaacacccattaatatctcttattttatttctatctttctctttttattacatcataaaatctataatacctatttttacctttctttcactaattgtctaattttactcaaattatatatattcatatttatttactttaaactatttataaaacaaaattaatcatatttatgcatataattaaccaagtttttgggttgaacgctagacgtctaaaaaccatatgtacgttcaccattattcattttttctccactggtaccccgttaaattttcttccttgatggggtatttttattagaatataatggttgacctgtttgtttaagttttttttaaattattttttttaataaaaatcacttttttttttaagtttaagcaaattatctatatgtattttttatgcaattttttgacaccttaataattaataaattaaaagttattgtcacgagttttaacataattattcaatcggtaaatttattatatattatatttatgattgaaaggcataaaatttttatggtataaatgatannnnnnnnnnnnnnnnnnnnnnnnnnnnnnnnnnnnnnnnnnnnnnnnnnnnnnnnnnnnnnnnnnnnnnnnnnnnnnnnnnnnnnnnnnnnnnnnnnnnnnnnnnnnnnnnnnnnnnnnnnnnnnnnnnnnnnnnnnnnnnnnnnnnnnnnnnnnnnnnnnnnnnnnnnnnnnnnnnnnnnnnnnnnnnnnnnnnnnnnnnnnnnnnnnnnnnnnnnnnnnnnnnnnnnnnnnnnnnnnnnnnnnnnnnnnnnnnnnnnnnnnnnnnnnnnnnnnnnnnnnnnnnnnnnnnnnnnnnnnnnnnnnnnnnnnnnnnnnnnnnnnnnnnnnnnnnnnnnnnnnnnnnnnnnnnnnnnnnnnnnnnnnnnnnnnnnnnnnnnnnnnnnnnnnnnnnnnnnnnnnnnnnnnnnnnnnnnnnnnnnnnnnnnnnnnnnnnnnnnnnnnnnnnnnnnnnnnnnnnnnnnnnnnnnnnnnnnnnnnnnnnnnnnnnnnnnnnnnnnnnnnnnnnnnnnnnnnnnnnnnnnnngttatcatgtaatttttttttatatattctttgtcttttatattaattagattttttatttgtatattttttattttctcactttacaataaatgattaaatatataatacaaaatttaatattttattaatattgtaaaatcacaatcaaaatggaaaaaaattgttaaaatgtcaaataaaataggatgaagggagtatagatgtgccaatcaaccattagtattgatttagatagataggatgaagagaaatactaataatacacttttttgaatataatattttttattagttgaaattttaaatttccaaaaaatcctttttaacttatttttattaattaaaatttatctaaattacaaaatcataattatttttcattaaataaagaatatgataaatttcatttaataacaaaaatattgcatttaagagaatatattcgaataatgttagtagcatttctcttatctagattcataattacccaccgctgaagtaagatttgggatgctaaaaaaactttatttttgtttgaaaattagaagtactagtaagataacaatccaccgatcgaagtgtttgcagctactaaatgaataaccaatcccaattatgctgggaaacaattctttattttattaatttcttaattacagccagccttttactagcaatagcgtgttttttggtcttgttcgtggtaccaattccaaccccacgtccccaccacaattctctttttgcgtcaatatttttctatgaaatattgccaaagggttttttttaatcaatgtttgcttttttggaactagtaaaggaaaatgtattaaaaaaatatattaaaagttatataaaaatgtatttgtaaatgatagaaaaatgtagttttatgtattataatataataatcataaaaatcctcttttactttctcaagtcacttgttactttgttagcacatttacctattggctgaagcagtaccacatgaactttcgcaacaagtaacttatttatccccatgagcctgctaatcacgtattcacggcttcacgcatgacgtaactcattctcgtggatttaaaatttatactgaaaaacgtggaaatcttgctttcctgtggacgaaaagactaaaagaagtactataactatataatataaatggtaaataattatttttttcatgaataggtagagtatggttaaatttatttttaaaaaataaaaatttaaattttagtttttaaaaataaaaaaaatgtgacaaatttattaattcgttaattttcgtccgttatcattaatgaaagagtctagttggcacatttcagagacgaatttatctgcgctttacacattgaaggatgaaaatgactatttatcaaaaatacaatttaatctttattttttttaatcatcgcaaacatagcattacgacaaatacttaaaaataggaaagaaaacatatattagaataaatataataataagtataatattaattaataaacataatctgtctctgaaatttttattatgacaatattaggtaataacaaaaataagttaggtttcattagcataaatttttgtttgagtctcatattttgtgtaaggtattgttatattataaatttcagacaataggcaaattatatttattaatatgtttgttctaatttatacttattttttatttttttaaagtgtttattataatattatgcttgtaataattaaagagggaaagataaaaattaaattatattttggataagtagttattttcgtccttgaatgtgtagtgcgctaacaaaattcacccattaattcatccctaaatatgccatataaactctgtcattaactatacaaaagttaacagatgaattaatttatgacacttttttcacttttaagaactaaaatttaaatttgatttttcatcttagataaatttataacactttatatattaagggacaaaatatctatttaccctaatataaaatatggttaatatgatttacagtgtacgtgaagttccctcaagctcacaacgatcatgttaactttgttaggtttttccccctctaactttgtttataaattactttcaacgattttttatgctgttatttttatgtttttcgtaaataaacatttcaaactttaatgttatcccaaatatttcacaaacttcagttatcgttcatttgtgtttttcttgaacttttattaaattttcctggtcatatatctatttgaatatgagaattagcataaattaattctaagattaagaaatgaatttttttaaataatcacttaaatcaaattgataaataccaccagtaaatagaaaaagttgttcataatttttacatagttctgtactagagtctccatcaaaacctttttcaaccaatccaaaaacatacgtttaacttgagaaagaagaaaagaatgacgcgttaaaataaatacacgtaaatcttctctcacgcacgaatataaattagttttgtatataaaaattataacattttgtggacttgaagaagtcttgctgtgtatatatacatatcttgtctatattgaattttgatgacgaatttgtggcaacctaaaatgcgtatgggaagaagctctgaaatttctctatctctaccaacaaacagaaaattccagtccatgaaacttcgagggtgaattgaatggccaccaaaatatctctttttattaatttctgctggtcctctctgagcccacaaacacaatcctccaatcctcaacccatgtctccacatgatgcatgtgtgcaccactgaaaagcacaaagctatacactcacgtgagaggacgtttgggtgttgaaaattaataatagaccaaattaattctcctatttatgatgttaaattaaaacagacatgaaatggaagtcaaataagtgtacgagcagaaggtaaaaagttttctcaatgtatatgtaaagaagaaatcacaagacctaatttattaaaatattttcatgtttttcttttgatagtagaatatcttttaatcttatctaataagaatgatttaccataatactatactatcttgggtggatgggatatgagatatcaagctctaatccacaaagttttattttatataaatagcaataccaatatataaataacaattatggcaaaaaatgagttgagctcacttgagtttaacttgactaattaatatttaatttaatctaaaactcgacttgagtttttattagctaaaatttgatttagtttaaactcacgaataacttgattcaactcgtaagcttaaataatatgaataatagtccaaatttttaaatcctatacgttttgaatttttaaattattagtagattttagataaaataattatttgttttttaaagaagaaaaattgaacgtattctattagttttatagaactataagatataacaataaaaaatcataattacaaccaaattaatataaataaaactatttcatcatgcatatataaaataatagaaaattcattcaattatataatttaatatatatgtgtgtgtgtgtatggagtcaattcatgaattaaatgggtaaaattatatgtaactcaagttcgactcatttatttaacaagctcaaattttagttcaagttcaactcatttaatttnnnnnnnnnnnnnnnnnnnnnnnnnnnnnnnnnnnnnnnnnnnnnnnnnnnnnnnnnnnnnnnnnnnnnnnnnnnnnnnnnnnnnnnnnnnnnnnnnnnnnnnnnnnnnnnnnnnnnnnnnnnnnnnnnnnnnnnnnnnnnnnnnnnnnnnnnnnnnnnnnnnnnnnnnnnnnnnnnnnnnnnnnnnnnnnnnnnnnnnnnnnnnnnnnnnnnnnnnnnnnnnnnnnnnnnnnnnnnnnnnnnnnnnnnnnnnnnnnnnnnnnnnnnnnnnnnnnnnnnnnnnnnnnnnnnnnnnnnnnnnnnnnnnnnnnnnnnnnnnnnnnnnnnnnnnnnnnnnnnnnnnnnnnnnnnnnnnnnnnnnnnnnnnnnnnnnnnnnnnnnnnnnnnnnnnnnnnnnnnnnnnnnnnnnnnnnnnnnnnnnnnnnnnnnnnnnnnnnnnnnnnnnnnnnnnnnnnnnnnnnnnnnnnnnnnnnnnnnnnnnnnnnnnnnnnnnnnnnnnnnnnnnnnnnnnnnnnnnnnnnnnnnnnnnnnnnnnnnnnnnnnnnnnnnnnnnnnnnnnnnnnnnnnnnnnnnnnnnnnnnnnnnnnnnnnnnnnnnnnnnnnnnnnnnnnnnnnnnnnnnnnnnnnnnnnnnnnnnnnnnnnnnnnnnnnnnnnnnnnnnnnnnnnnnnnnnnnnnnnnnnnnnnnnnnncctcttgacccatttaacatgccttgcctaacacattcagaaagaaattttacttaatgtctttttttgggtcttattagaaaataatattttccatcaatcttttttttttttttttccttttgaagcttatttaattcataaatttacattatagtttgaatataattcacgtttgagcatattgaatttagccctgctatatgtctcaactttcgtgtttgccaacaatggcaaaatcctagatcaaaacttgggtcgattactagctagcctcatattccaattttgactcactcaagtatcccccatgcacgagtcttgtatgtaaaacgatacttaaatgttatgtggatcacactctcccataacatgactcttcttattgtagatgctttgttgatgtttatagactacctaacatatcatctcttagcctccatttggtaagagggaaatagacaatttcaaatagtgtgaatttcaaattttttatactctattttaatttaaattaatattttttttcatctccttcactaaacaaaacattagacttctacatatatactagcttaaaatagtaagtgtttgtgaaaataaaatctataaaatatattagttcattatatattataaataaattaactcataaaattgtctcctattttatttccctagtgtgatgtggatttgaatgaatgatgtggggggactagggagggagtacagaagaaggcagaaaaataacgtgcaagattaggcatctatgaagggatcattcttatttcttaagactaagaaacactcttttttgtccgctcccagactcatagggaccaagacaaagacaggcactgccctctgtttggaggcttaaccttaacgagtccacttttcttaacttgcaattaatattaatataaggtacacttcgtgagacatccaactttggaattgagtattcaaaccatagttgttacattcgaattttaatcatcttatctggtgaatacattgaaattacaactagatttcatggtcgtacgatatactgctgcaaaaaaaaaatgtaatgctatttttatattattaattatatacaaattattaataatgatatgactttaattttcatatattgtcaatgcaaaataacattaaaaaaatgacaacttttagttatttgatttatttcatttaaattttattattttactatataaaataatttaccctccattaaataattaagggaaaaaactacttatttagtccttatacttgtacaaattttatcttctagatttcacacttaaaaatcctcacttttagtccttgtatatataagcacttttatatcttttttagttcctacttttacggttatacaaaatttaccttttaatggccttattattttttaaaggtagggactaaaaataatccaaaagnnnnnnnnnnnnnnnnnnnnnnnnnnnnnnnnnnnnnnnnnnnnnnnnnnnnnnnnnnnnnnnnnnnnnnnnnnnnnnnnnnnnnnnnnnnnnnnnnnnnnnnnnnnnnnnnnnnnnnnnnnnnnnnnnnnnnnnnnnnnnnnnnnnnnnnnnnnnnnnnnnnnnnnnnnnnnnnnnnnnnnnnnnnnnnnnnnnnnnnnnnnnnnnnnnnnnnnnnnnnnnnnnnnnnnnnnnnnnnnnnnnnnnnnnnnnnnnnnnnnnnnnnnnnnnnnnnnnnnnnnnnnnnnnnnnnnnnnnnnnnnnnnnnnnnnnnnnnnnnnnnnnnnnnnnnnnnnnnnnnnnnnnnnnnnnnnnnnnnnnnnnnnnnnnnnnnnnnnnnnnnnnnnnnnnnnnnnnnnnnnnnnnnnnnnnnnnnnnnnnnnnnnnnnnnnnnnnnnnnnnnnnnnnnnnnnnnnnnnnnnnnnnnnnnnnnnnnnnnnnnnnnnnnnnnnnnnnnnnnnnnnnnnnnnnnnnnnnnnnnnnnnnnnnnnnnnnnnnnnnnnnnnnnnnnnnnnnnnnnnnnnnnnnnnnnnnnnnnnnnnnnnnnnnnnnnnnnnnnnnnnnnnnnnnnnnnnnnnnnnnnnnnnnnnnnnnnnnnnnnnnnnnnnnnnnnnnnnnnnnnnnnnnnnnnnnnnnnnnnnnnnnnnnnnnnnnnnnnnnnnnnnnnnnnnnnnnnnnnnttttttaccaataataactatggtgttaaatgttaaagatgaaaagttaaaattaaaatttaccattgttgcttttataattttaaagtcattgttatgacattttccaataaccatgatgattaatattagccacattcttatatgcgttccttatcacagttgtggaggttctttgatcactgttagcgtcgtcatatcgctatcgtcatttggcattgacattgaccaccactgtcgctggaattgtaggaaaattggttttttttcttcttctacgtaaaggtgataactcattttctaaataaaaagccaatcaaccgatggatttgagtattaaaattctaagattcaactgaaacgaaaagaaaatcaaaatttatgcgggccatagaattttattcaaacatttgaatgcctatggagatcctaatatcgtcaataccacttattaaataggaatattcttttaaaaaatgtcgtgctaattcgaactctatttaatcttgcttctattaaaaaaaatgtttcaatttttacattattatttacgaactgctaattaaaacgttttctttcattagaaattaaattccttttagaaactaaattctgaaaacgattacctttgaaagatacctgcttcactcatatcctcatcattctctttccaaagaattttttattattattggagtgagcagcaaggagcaagcacgttatcttttatcaaaattttctccctatatacaaaaagacttataaaagctaaccagcagttccctttataacaagccgaaagacttcaaagacatgtacgaagagaagaaaaagggcagaactttagacttttcactttgtaagagctaaccaacggtttcaataggatgcctatgattggccaaggccacaacggggtttttagagtgtatatcaataatcctcaaaggcaaaacttaatgcttctggaatttatgttatggacgcataaataacatttaggtgcttcaagttggacgtgaatcccaaacgccaaaagctaaatgaaacatacacggaattatgcacaattttgatacttcaattatggattcaactacatatatagtgttatggaatatgaaaaggtaaaacactggcagactttcattaatgagtatgaacaaatagttcaagtaaacttaacattacatctaagtcaaaagcttaaaacattaaattggtggatccttttcatgttatgttattcaacatgtcaatttatattgaccaataaatatactcacacttgtcactctaacaatcttcatatgaaagtatgtgagtccctttcacattatatgttcttcttctcaaatgaaactctttccatttttttcttgataacatgctccatccttttctcattttttagcttgtccatgtctctcttatagggtgtattacaagtttcattatcattattgtacacacaaaaaagtctcattagttaataaactttggacacttcagctggcttaagaataaatgactctggttaatgtgcatacaacactgttcataatatccgtggtctaacctttcatttctaaaatccttgatatcaggatgtttacctttaaaaaaagcctttgaactatccaaccgtacattattaaacctttgttttgacccaccaaaaccatggttaaatagggttaatcaggatttaacttttgggcttcttacgtgtaaaaatggcccaaattttagtcagtccataacagcaaagaggaaagttgggcttttccgtgattcttagggggtccaaaatcaaaatgtcctaatcctaccctttaattaacagttctctggggtggaatcacataggatcagaaccgtgggacccaccactccgacggcttttaagaacaggaccaagagttcaaagagaggttaccttcttcccttaaaatcatatcaacgcctacaaaaaaaagtgaaaaccttattggaggaatatgctttcacaggccttatcacgcaacatccaaataacgaccatattaatttctctcttgtatggttccctttgtcccttgtttttgttttgtttctcgtctaatcactgtgtaacaagtttaactcctaggctataatctcatcttgtcacagttttgtgccaaagctcaacttaatattttgttcctaatgtggtcattcggataaaatccataatcaactacacgacagtgtaaagataggaaaaagaaaatgctccaagtggttgtgttgtgtaactttcatgtgccgacattgataacgcttttaacagttcacaacatcatgcaattggtttgcaattagtaaatcactaaactagatctatctggctttaatttccacccgaattggattaaatatttcattaacatcaatattggtggacaatgtagaatcgaactacttttatcaacgaaagacaaaatattgagtgaatttatttaaatttaaaaaacaattttaaaatgtttttttaagaaatagatatgattttttaaaataaacagaaaattaatttttatttaaataaatacacaaaaaaatagaatgatatttattttattaaaataaatacttatttcaataaataagctcaaacaaacttattcattattacttgtttatgttatccatttaaataaagaattttttattaaaataaatacttattttaataaataaatttaattaaactgatccattattacttgattatgttattcgtttaaataaagaagaaagaatagttataattaaagggtattacacaacatttaacaaatattgcatcataatggtataaaaatttcactatattcgtatgtaaagaataatatatatgtctcatttcacaagtaggattaatcttttaaataaaggattaaaaaataactgggttctctccactaaaataatattgcactgtaatatatatatatatatatatatatataaatatattgcctatgatgtttttattgactataatgtgtgagagtattgttggaattttcagcccccacaaatatttttgttgttttgttgactgacactggcaacaactcatactctgatgcaagtgactacttccactgtttgtctttctctccctcacctctatttatatgtccagaaccccatacacttattcctacgtattacttcctgctacccctaattattcatttattctgtccatcttttttattatttatttcattcttgcctcttggccactttaacttcctcactcgcattcaccgaagtcatgaacaaattcaacaaatctgaacttctagtgctctttgtccttgctcttctccttgggatcacacccttgttaccttcctgtctgagaccaacctacctttacttcatctttaacgttctcatcattgcacttggagctgaagctggtcttctctcagttttttctaagcctttagaagacaaaaagcaacatgtttctgtcacccagaaacctgtaatgcccccagaagtgtatgaacctgaggaaagggtggaagtgggtgcctcagaatatgatgaaaagaagcctaaggttgttgaaaagcctgcttctgatgagaagattgttggtgtcactgaggtgaaaaagtgtccttcaatgccaaatcttttgctcataggaggtggagaaaatgaaggagaagtcatggatgaggagattgaagctgaagatgaggttgggggagttaatgggcaagagctgtttgcaaaagctgaggccttcattgggaacttctacaaccagttaaagatgcagagagagaattcttggctttatcaggaagccttttaggaacgcattagctttttctctctttaatctcttgaataaattatttccagggtgttaaatttagaaacactggttctgagggtctattagtttttaacccactgggtttgtacagattctaatttggaattagaggtcaggtctgtttactaatttcaatctgtattatcatcttctaagttcctgttaaaagaattttactgcatctattttcatgctccaacaattaaaaagttgcatgtcattgaaacatagcattttctattgaaaataaactgtggtgttttttttcctgcttaaattaatgggagacgactgaagagaataagaccgggggaggctggaaaagtaattggagttcactgtcggtaagacatgacatatataattgtatatttgtaactggatttctgcatgactatcaataattgactggggtctgcgtatatgattatgatgtatgcttcatatctatcgtattttataaagtacaagatgcagtatacagattatgtgatatcaattcatgcatcttgcactcctaaccaaatgtatgtataactaatcaaactttgatgctgtttaactcatcaaacttttaagtctactttagcctcttaatagcaaaggtttgcacaaactataattaagtagttaactagtaagtatcagttttattaataattgtttatagtattatgcttaaggaatcaaaagtagaatttttttaatgttattcatatattatttttgtaatttttaataaagaattatattagtttaaccattactcatggttattagtaaaatcaattataaattactagttttaaagagttcttggaaacgtattctcactaaccattaatgagttgaatgcactacttacttttaacatgtcaaaatagactagcttttagttaattaagcacaaaattgatctatcagagtcacctagtaaaaataaaaattacataagaatattaattctttagctctatttgagtcggtttccgtttttctcaagtcatgtgataactgatgacgtgaccagcttatgggatatcttattaaaaacagcatgttggatatttttccatgcaattggacgaattttttttcaaaacagtgcagaattctgaaagtgttacttcatgcccaaaataagtgccaggtaatgtttgatagtgccagctgcatataaaaaaagaaagaaagacgacgagtgttcaatttgacaaagatcaagccttattttgattatacatctgtcatgattctgcctaatccatcttatcaacaatatatatacagaaaaatatatgatccaacttgttaatacccgttgctcaaactaaacagtggacagggtctgaatctaatttggggtatcatgtttctgtccccgtaagaattttacaaaagaaaataaaaaattgacacaatgagaaagcatttttatttgtacgatttttgttaatatttaaggttgctaaatgctaatggcaatgcactcatcctatgcatttactcgctgtgtccaattgtcgtccgaaaaatcacaaatatttttcttaacatcaagaacattaattgttagataggtttatagacccctgtctatttcacatgaggtaaacatgttatgagatctctattattttttttattatattgtactataaaatatttatcaatattagtaattaataattaatttttgttaataaaatattctctcgtgatcatattttatctatttattataaagtttaaactcaagaccaacacaatgttggtaaagacccatatcattatttatatgatagtgagacataaatttaaaatatactagatgttagagacacagtggacgtgttgtgtatcatcttgttgcataaaacttcttatatatatcaatcaaaggaatctaggtttaccatctcttctgaaatagttagttggttaccttagacgcggccttttagataaataagaatatatctattaacacattatctcttcttttttgtgtgcgcaaagaatcaaagaatagacagccaaatttgtccaatgacaggcactgcagcagtattagaatagcactaaatttcaatatcttactgcggcagtattaatatgcagctcatttaagaggttgacaaatacaacactcagcggagtgtggagatatttttgcactattagtaatccagaaaaacattaaatttagaaattcaacattttaatactctactttattttttgacaaaaagaaaaaccaaattacaatagtaaaattatattagtgtgcacagatgcacatgtcatttcatttaggttggtgacaaccaaaaccttactaggttgtaagtttctttgccccttttaaagcaaataataagttgtaatatttcacaacctttttttttttttttttacagaaatctttgacaactaataagaatacaaaattttgtctctttatctagctctctaaaaataaaggcattgcgtagacattatattttnnnnnnnnnnnnnnnnnnnnnnnnnnnnnnnnnnnnnnnnnnnnnnnnnnnnnnnnnnnnnnnnnnnnnnnnnnnnnnnnnnnnnnnnnnnnnnnnnnnnnnnnnnnnnnnnnnnnnnnnnnnnnnnnnnnnnnnnnnnnnnnnnnnnnnnnnnnnnnnnnnnnnnnnnnnnnnnnnnnnnnnnnnnnnnnnnnnnnnnnnnnnnnnnnnnnnnnnnncaaataataagttgtaatatttcgcaacaattttttttttttttttacagaaatctttgacaactaataagaatacaaaattttgtctctttatctagctctctaaaaataaaggcattgcgtagacattatattttggtatttcctgtggggtcaatttaccttggaatgttgcttgagaatctctttttttctgtaagacgttatcctttagattttttgttttatcttaataatagggatatggaaataagtttgattttatttattatttaatttttatttgtgtaataatagggaattggaatttgattgcctatggtccaaatacgaactactgcatgctgaaataatttgaatttgaacggttctgatttgtttaaatacatttaaaactatttttaattataaaattaaataacttggatgaatgagatatagtgtgtattctccttaaaagaacataggttgtgcgttacaaaactaaagatgaagtattagacgataattcaaatatttgttaactgataatttatgggacaactttttcttttacataaaaatgtttaaatatatttttaatctttgatatatatttaaattttatgtttgatccccaaaaatttatcttttatatttattttttgatatttgaaaaattttgttttaaatctcgacagtcagttaagtgataatgtattcgttaaatatttgataacacgatttgtaatgactcaaaaattatcaatgtttctttcaaaatcaaatttaaaacagatctcaaatttttttaagtaaaaataaataaatctcaatttgttataaaaagaatgtcctttccttctccctcctcttccgtgaccacctcctcctctgcgctaccaccttcaaccactctcgtgtcctatgtgtctccatcgacgtcgatccgtaatgggccctcactctgtcaccaccgtgggcttctgccaccattgtcgcatgtcccaaatctccagtgtcagattcccgtactcaccttcctccaccgagaaccatcgagggatacgcggtttgaacattgtgttggaataaaaatgattcatgctctcacaaatggaattgttttgaagaacgaatggcaacttgccctttcaatttggacagtcacgaattctggcaatgacttcaattgggtgttcaagaaggggttccttgtttgcagcagaattgggattcatagaatggtgtgttgcacgctggcttgatgccaatgaaggggtaagaaccaaatctgtattcatggcacgacacgacgaaactccgacaccgacgcaacaatgaccactcatccttcaactccttcatcatccttcacaatgacagacgaaagttgcggtagatctggattcgtgtggtgcaacatggtagatcttcgacaaggccacaataatgaccgatcccccttcaaccctgtcattgtcctccactacaacagacaaaagttgctctagatctagatttgtgtggttcccaccatgttattgttgttgcaatggtggaagtggttcgacaccgacgccaatggtgaggaccaaattattgttgtttgatttatttattttttactttaattattatggtgattcttaattgtcataaaatttaaatttgattttcaaataaatactagtgatttttgatccgttataaatcgtgttatcaaatatttaacggacacatcatcacttagatgacagaaattcaaaacaaaacttttcaaataccatgaagcaaatgcgaaagaaaaatttgtcaatgatcaaacacaaaattcggatgtatatcatagataaaaaatatgtttaaacctaatgaaaaatacccatcaattttgacaaactcctcaaaataaagaacgctcaacctataaaattgtttatgttgtaagtggaagtgtggaaccaaacaacatcataacaaaatgttgtaatgtgatttaattttcttatagtgtgctattcgtcttcttttaataatatgaatcaaatgcacccaaattcaatctcaattttgaaaaaccatatcttctactatgtatttcttaagacaacgatttaaatgtttagatttgtttaccattttttttggtaatagaataaaacaatttcaatagtgagattgcatagagtacgttttttaaagattaattatagataatgatgaagtcatcatcatcaattaaaatgcaaaatattctttcgttccttcgagctagaaataccatttccgtttgatatgtgtggcatttgatggtttattttcaccaatattcttcaattctcttgcatcttcaaagaaaaccaaaatttcatattaatttcattcattcatggtcccatctcaaaaacattggcagatatgacaaaactaaattccaaagtaaagattaaccttatcttctaaagtctaaacaataaatgaaggtaaaaacttacaactaagatttagatttcgagcttccattcgcatccctaaggtccacactcacatcaagttggcagtatttgaagaaataatagaaaatcaaatgtataagataatcacgtacgatcacagctttttggtgagaaaaaagggtgttaggagcccgtatataaaactgcaagctaaactgaataaaataacagaactagatatatcgacaaaaaactaaattgaaataaatgaaaaaagacaattctcacatcaaagatttgtctttttcttttctgaattgtggagtacaagaatagaattgataattgagttcatcatgcattatctaaaatatatataacaatggagaccgagcacaatctaagaactcatatccattcttactcaatgtgtttgcaagcatgagtctaaattaagtaactgcaaaagattcgacttgtgtgcaagcaaaagagacaagtcttgtgtgtgcaagcaaaatccattgaaggatcttgtgtatatttttagcatgcagatcatttgtagcctgctgcacaatgaacaaaacttctgtttttcgatttaacaacatatgaaccattgaatggaagaatctacactaaccagagatgagagatgacttgatgttcggttgagattttggatggaaaaaaattgtgcaggaaatgcgggagagtgggagaccatccgaactacatatatattaaccatccacttataacatactactatattgaaagtttattaaaaaattcataatcctaggctagaaattttaatttttttacaacatataaattctaatatttaaattaattaaaataatgatattaacaattgagaataaaaaatcattattaatacatttgttttaaaaaataaattaaaaaactattcctaattttttcaatattttagatttaactgtgcagtcagaattttaaaattctaacccttattacattaaaaaatactaacattaaaaaaatactaatgtactctttcaattactatatttttaggaaaaagagtatttaggcaccttaaattttatctcttctacaaatagacatattaaattttaattttagcctagttgattcctaaactttatcaagataccatgaacttaaatttcgttttaatcttcttttttttgtgttactatttaaacatggatttatgtatggttggaggcctttgagtgtctcttctaatttttataatccttgagtttaccgaacatcttatttgagtcaaagtgaaaataaaacaattaatattatcagaacaatttaagacctacaaatgagaaaacaaataccataagagaaatatcacatatctaaagctaagttaatgaccaaagattagaggggaacatgatcaaattaattaatgattaacatgtggacttaactgaggatgattgtgcttactaaagtgaattggaggatcaagaaagttcttgaacattcctatgtatgtttcacaatccattgcttaaaatgacatatacatagaatagtttctttataaaagacgaaaattttgccaccatttttataaacgtttattgtaagtcgtccaaattatgttgagataagtttccaatgattaagtcctaactccgacttggcaggtccttgcagaagtggaacacatgtcaaatgattaagcacatgtaaataaagcaatagatcgaccacaaaataaaagctgggacttcacatgtaattgaagcagtggaccacaaaataaaagtcataatgtcactcgcgttttaagaataaaaactacattgtaaagttccttaaatgtacattgtttctacattaaatagataaagattatccgcctttatactcaagagccattgtgtgcatgtttggattccaaataaaattgattttagtcccaaaaattatggtgaataattaaaaatgaagaaacaatccaaaattgttttgcttgtgagttgtgacaatggaaaaataagtaagatgtgacctacccaaacacgcactgacatgactagatttattatcgtgtatgtacgggtatattatatttttttaatgtttttaaattttatttttataataaagtaatttatatcaatactttttgaaatttcataaaattattttactatatgaccgttaatattaatttataatatatatatatatacctatttctgaatattttattattatccatttgactttttttgaaaaacatatttttatagaatattaattaaatatcaaatttatttcataaaatatatgaaaaatctatttatttatatatttatattaatattatactgataatatcaaatgttatatcaatattgtttgtcaaatatactttattcaataatttataaattaatatattcaaagtcaatatatatatatatatatacatttaattttttttgtgtttaagctagttttatgaagtaattttataaaatatcaattgattataaaaaaaaatatttcgtctttttatagtaatttttactgctgtaattatgtcgtgtctgattttagaaaaaaatcaaaatatattcaggtaattaaaaaatgataaatattaaaattcgcctataaaaatgtatgacattgatttttaaaagataaaaatttaaatttaaaattcataaatgtaaaaaatataacaaattaactttataaataatgtgacagtaaatcaatttttaaattttataatttaatatcaaattaattttaaaaatataatttataataaaattaattcttaaatattaaaatttaataaaaaaaataatcttataaatttaagagattaatttatcatattttttatatatttaaaaattaaattcatatttttatctttcgtcacacttttaaaattatatatatatataaaaaataatctggaaggacttataaaaaaccttgttggtgagaagtcagagagtgtggtgtgagtgagtcagagagtgtggtgtgagtgagtattgtgttgtttttgtttggttgtggtgcggagatggaagtgtgtttgctggaggaagtagagaatatcctaaggtacggatttcgaaacaggaagattctagaagaagccctgactcactcctccttcgtggacgctgtctcctacgagcgtcttgagttcgtcggagaccccgttctcagtctcgccatcagcaaccacttgtttctcgcttaccctcatctcgaccccggccaactctccctcctccgcgccgccaacatcagcaccgagaagctcgcccgcgtcgccgtccgcaccggcctccaccgctacgtccgccacagcgcccctcccctcgtcgaccaggtcgagcgcttcgtcgacgccgtcaagctcgagaatcaccccgtctctcacggcggttccgtcaaggcccccaaggtcctcgccgacgtcgtcgagtccgtcgccgccgcggtttacgtagacgtcaatttcgaccttcagaaactatggatggtaccgtaccttttatcaattcatcatcgcctttatgttagttgtatgttagtttttctttccttccgccctccctttttctttcaccgccaagctattcttatatctcctcgttatcacgtttataacaaatcagataaggttttaagttgagtgcttgtgctctcgatgaatgtatgtaaattattattttgattatttgataaggttttaaattttgattgcattccaatagaagatacttgtggtctagacaaaatattgggaaaaatccaattcgcacgagccagagatagtgccaagataaactatataagtagagaataaccctcatcctatgagataatttttggggttgaattggatccaaactcacattcaagtccaaaggtgctgggcggcttgtattggggaaaactcaagtcccacgatagattatataagtggggaacaatcctcaccctatgagctagtttttggggttgaattaggtccaaattcatattctaagacaaaaagaattgtgattgcgatttgtgctaaccaattcattatgatgacacctattataaatgatttttagaataagcttttacttttacattgaagttgcggtacgattcaagatgatgaaaatttggtttgtgattgtggcagataatgaggggtgttttggagccaatagtgacaccggatgttttggagaaacagcctcaaccagtgactatgttgtatgagatgtgccaaaagaaggggaagcaggttgatataaaacagtcaagggaaggagatgtaagtgttgctaaggtgtttgttggtggagagtttgttgcctctgcttcctcttctcaaaaggatcatgcaaagcttgaagctgccaagattgccttgcgtaaactcgtacatttgatgccttccaccgttaagaagtctgccactaacatgaatctcaactttactgttgatgaaaatggtaccttggttgttgaaggacccaaaaataaacttcgtgatatttgtgcggttaaaaaatggcctataccagagtacatgtactgttctttaacatgattttctttcagttcagttgcatgcgtgatcgaaacttttaacattccttgttgactaacttgttgcatctcttcaatggctcacagcattgaaaaggattcaggtccctctcatgaaaagaaatttgtctgcgcagttcagattccaactgctgatggtattcttcaaatgtcaggggatgaaaaatctcgggtgaaagatgcagaaaactctgctgcttccttgatgattcaggccttacagcagtctaattatatgtagaagagaatggtgttgtaattttagggtgtcttccatcttctgttgtgattggctattgtttagaccatagtgcagcttggcatatgaaatcaaggtttttttctttgacaattttttccgatccatatgaaatcaacttttcaaccttcttgtgacatctttccttttgtgaagggttgacttttcccatgtatagttttctgatcaagtagagcttcctattctttaattatttaaaatctaaagactcaaatttatgtttagatggagagtgaatctggaccactcattggtacctaagaacctaaaacctcaatctattttctcatttttagttcatgattggctgtgtatgttcttggatgttttatattgtgtgtttagttgtgatttgatcaaggaggtttcaatgggttttgattgaggagattcttctattggtcaactgaatgatccaattggttcttcactcttatcttggtgagttttggacttgtttggattgatgaagagaaatagaatgagataaagtggaataaaattttcagtctattggttgcatatattataatagaatggaacaaaattttcattctattatttggaagaaaaaaatgaataattattttactctcatattatctttaatctctaacaatctcctttacccatagatgaagataagttttttatttttgaaaaaaaaaaaaaagtccattcttgataatctcatctatttatctttatttcctgtgtttactggagttgctcaatcactctctcaacatcatctttattctttgattgcttgcaaaccatgccaaggtatcgaattttcatattaaatctacgtaatttccatgatatttggtagctgagtgtgtgtgcggcaagttagagaggaatggaaggaagaataagaacgtagcgaaataaaatactgaaaaatatacctgtcatgaatttgaggacaagccacaacgtggagcaaaaccattataatcatgacgttgagagagaaaaatatttaccgttccattgcatacaccccaatttggtgaggaaggaaaacggctaaaattgataggattggatggaatgggttccatgactttcctagtctattccattgtttatttttcaatacaaacaatggatcttaatcccactcttccatctactcccaccaattcaaacaagggattaattttctacactagccatttttctaatacattcaatatatacagtataatatcgattttatccttttcgtaatctgtaaaataaaaaacttatattaagaccaacagttcaaaagatgaaaaaaagagagttcttaaatgacatccctccccaagttcacatagtatccatttatcttatgccaagaccactctcctcagtggtaatctcattgatcagataaatggtatgctaattgccttacacctcctatgtagcattgtattggaacatgcttcacatgcatacatgttcatcatacatacccaaaaaaaagtctcagaaaaatgaagcaaataaaaatcaagtttaattcatccaaataaaatattttatcgaaccaaattgatttaaaacaagattagtaaacttacagtttttgacaattcaccgcctatctccatactgcgcaggcacagcggaagaatctctgttgaaataaggaaacttatagctgctgtattatcaacctggtgaaatatcaacagaaaggaaattaaacacatggcaaaactcaagtataaatgtacatgtgacaagcaacnnnnnnnnnnnnnnnnnnnnnnnnnnnnnnnnnnnnnnnnnnnnnnnnnnnnnnnnnnnnnnnnnnnnnnnnnnnnnnnnnnnnnnnnnnnnnnnnnnnnnnnnnnnnnnnnnnnnnnnnnnnnnnnnnnnnnnnnnnnnnnnnnnnnnnnnnnnaaaaacaatagcttcatcccactaggaaaaaaaatcaacaatatcttgaagggcataaaatagttcggaaaattttgttccctgatactagcgatgaactaatcctaacaagttgatttgaatgtacctgttacatcatagaaaattattacaggaatcaatttgaaacttaacaaatagttgaaaatctacatgaacattataagattataacaagactaattatttgtggcaactaaaatatttacacatctacctgtgtgccatagatttataataatcaataatcagttattactgttttttaaatgacatattagttgaggttattccggtatttagtattttatggcaaggtttattgtgacaataatttactaattgaaattattctctgttcagcataaatgttgtataaaaaattattcttctcgtagtctagtgtattcaataacagaatcagcaaggacgtagcaccttcactaaggtaccgatgactccaagactggtaagcctcaaatactcaaatggcttggcctcactggttgtattaaggaagggatacagatatagaggtatatgagctgcagatgacaagaaggtaagtgtaaagagtgaacagagtaatatcttttcctttaagtgttagtttcaatgagcaaaaaccctgctgaaacggatatggtaatgtcaaagcaatctccttaattttatattaacaaaagaacaactaatatgcctttcaattgcccaaaagtttctttccatggatgcttatgaaagtatattgacagtaaaaaaaaatataagtatgactgaatgctaagaaagaagaacaagtggtatgacctttaaattgaaagagagaaacttcattttctagtaagataaagtagaagtcctatgataagatagagagagagcaagttgcatataaaatttgtctgcatgattctgttttatatgcagataaatttttagattatgtatgatcttttaatatcaacatcaacaatacctttaattcaagttaattagagtcgatggtagataaattcaataataaatatgaaaaagtaaaggaaggggaaaggaaagaaaaagggtgaaagaagaatgagagaaatgaatgcaaaagaaaatttataacaattttaaccatctttcatgaaattttatagtttaacaaattattttttactttttaattgttagcaattggatgcttttacaatattttataacaattttaaataaatgcaaaagaaaaattattagtgagaaaaaaaaaaggaaaatatagttaggagatgataagatatcaacaatcattttatatttatggaaaatataattaggagatgataagatatcaacaattattttcaaagatactatttatcataaataatattatttagcaaacagaagttcacggtcttcagatgaataagaaaaaatatcattaccatggaggaatatcatccttgtatcaaggtgagatgccacacactgtaaaaaaatccatgcaaaagatatgtgttagtaagaatgcattgaagaaaaggagaaaaagatacgacaaagtatatgtgactggaccatggttctaaattgcacccgaaatattgttgttgcagtgttgtccgcaacctgcagtgtgaatttcaatcacacaaaattccgcaacgcatctgctgccacctagccacaactgaaccgtattggagcagcaacggaacctaagcaccgttctattccacttttttttgtaaaaaaataaataaataaataaatattcattttcatttctgaaagtgtaaatagctcacaaatccattcctgaaaaatggaaattcaaatttctgttgatgaagtgaaaaaaatatgacaaatttatctccctattaattttcatctattattgttaatatttatggaccaatttgttaatgcactacattgtaaagttacttaaatgtacattgtaaagtcataatgtcactcaaagttacttaaatgtacattgtttctacattaaatagataaagattatccgcctttataatcaagagccattttgggcatgtttggattccaaataaaattgattttagtctaaaaaattatgataaataattaaaaatgaagaaacaatcaaaaattgttttacttgtgacaagtaagatgtggtgacctacctaaccaaacaagcactgttatcatgtatgtacgggtatattatatatatatatatatatattaatgtttttaatttttttataataaagtaatttatatcaatactttttgaaatttcataaatttattttgctatatgaccgttaatatttatttatatataatatatatacctatttctgaatattttattattattcatttgactttttttgaaaatatatttttatagaatattaattaaatatcaaatttatgtcataaaatatatgaaaaatctatttattcatatatatttatattaatattatactgataatattaaatgttatattaatattgtttgtcaaatatactttattcaataatttataaaataatatattcaaagtcaaaaaaataaaatatatatatatatatatattaatatacatttaagttttttttgtgttcaagctagttttataaagtaattttataaaatatcaattgattataaaaaatgttttgtcttttgatagtaatttttactcttccaatgtttggtgtcccagaactcttccacaagtgggccttctgggcccaaagccaaggccttttcctcgctcagaaccaccgccaaaatctccacacatactgattcacacttactcctctcttatttttcatcttttctattatttttttctatacttttcaatttctccttgtgcaaatatctaagctattttttttattttactttattttattattataaaaaaataatccaaaattttttaaacatattcttgagaatttaaggggggcactgccccccaatctataacctgcgtccgcccatgctagggtgggcaacatccccctaaaattttattatatatattaaaaattaaaaattaaaaaagtaatttaataataaaaaaggttatatcatatgatataataaaatataatattttttaatattatattaaaaaaagataaaatatttttgagattgtattacataatataatataatagaaatttttaagattacatgcctaattttttaagattgtattcaaatatagtatagaatattttttaatattgtattaaaaataggatagaatatttttaagattatattgcataatataaaatatatttaaaattatattgtataatatgataaaatatttttaggattgcattcaaaaattggttaaaatcgaatgattaagacaaacaaatattctttctaaaaatattattgataatttttaatctggttatccttgattattttatcatttttttttctttagattgttctattattttttattttaatacctttgctacaaaaagatgtcttgtgtagttatattcaatgagagcaagatgtcatgtcccacctattcaatgagagcaagatgtatgacaacaagatgtcatgacccacctattcaatgagagcaagatgtcatgacccgaacctacccaaacacgcacttctaaaaggaatttgacttggttataaaaagaaatctggaaggaccggacttggaaaaaagtttgtcgatgagttgaagtgagacagggtgagagtgagtgttgcggggcggagataagggggcgggggctagaatatatcatatgatataaattttattaatataaattttatatcaacatatttccccttcttttggcacatctcatgcaacatagtcatgaggctgtttctccaaagcatccggtgttactattggctccaaaacacccctcattatctgtcacaatcacaattattttcacaaaccattttttcatcatcttgaattacaacttcaatgtaaaagtaaaagcttattctaaaaatcatttataatagttttcattcattttcatcataatgaattgattcagcactgcaaatgaaattaaattttattaatataaattttattatatatattaaaaattaaaaattaaaaaagtaatttaataataaaaaaggttatatcatatgatataataaaatataatatttttaatattatatttaaaaaatatttttgagattgtattacatgatataatataatagaaatctttaagattacataaaatattttttaagattgtattcaaatatagtatagaatattttttaatattgcatcaaaaataggatagaatatttttaagattgtattacataatataaaatatatttaaaattgtattgcataatatgataaaatatttttaggattgcattaaaaaattggttaaaatcgtatgcttaaattagtataaatagaaacatattttgtggtaatcaattcattacgatgataacgaattataagtattataactgattaccaggcaaggtttttaatttcacttgcaatgctgaatcaattcattatgatgaaaatgaatgacaactattataaataatttttagaataagcttttacttttacattgaagttgctgtataattcaagatgatgaaaaaatggtttgtgaaaataattgtgattgtggcagataatgaggggtgtttttgagccaacagtgacaccagacgctttggagaaacagcctcaactatgttgtgagatgtgccaaaagaaggggaagcatgttgatataaaacaatcaagggaaggacatgcaagtgttgctaaggtgtttgttgcctcctcttcttctcaaaaggatcttgcaaaggtgagatttgtgccgttaaaaaatggccccagttcaaattccaactgctggtggtattcttcaaatgtaatatcgggtgaaggatgcacacaactctgctgctcgatgattcgggccttacagggtaattatgtgtaggagagaatggtgttgaaatttaactatgagtgacggagctatattgttgcaagtaatgaccatgacacaatatataagataaaatttggagttatctaatgggaaattttttttaataattatatatacttatataattaattatgattaaaaataaaatttgacactactttaaaataaaatttaatattatttaaaatttgatactatctaaaatttgatatacatatataaatttgattatacttaaatttgatactaataataataaattggtgtcttccatcttgttgtaattggcttattgtttagaccatagcgcagctttgcatatgaaattaaggtttttttttttttttttactttgacaattttttcggattcatatgaaattaattttgaaccttcttgctgtcaatttatgaagggttgactttttctatgtgttgctttctgatcaagtagagcttcctattctttaattatttaaaatctaaaggctcaaatttatgtttggatggagactgaatctggaccactcattggtacctaagattctaaaacctcaatctatttctcatttttgtctcttctttactgactctgccacaattccataaacctcttgacttctctcagttttcaccaaacactagctcgctggtttatacgattttcgttcatcggagttattattctcaaaccagttcgattaacgctttccccttatcttccacgtcaatatccaatgctttgggcattagttgcaaatttgccatctttgtcgctgacacatttagttcatgattggcgatgtgtatgttcttggatgttttatattgtgtgtttaggtcttatttgatcaacgaggtttcattggattttgattgaggagattcttctattggtcaattgaattatcaaattggttccttacttttatcttggtgagttttggacttatttggattgatgaaaagaaatagaatgagataaagtggaatataatggaataaaatttccagtctattggttgcatatattataatagcatgaaacaaaatttacattctattatttaaaagaagaaaatgaataattattttattatcatattatcttaattttaagaaaaattgaaatattatatttaatctctaacaatctgctttacccatagatgaagaggagtttttttttttttttttgaaatatatggctcattatgattttaatatttgcattcaattaagaggtgactatgctcatcagctcatgtatacttcactcttaacatcaaacggaaagatagttcccttcccattcaattcttcattctctctatacatgcccaactgaaaatcctattttatgtatgtagaaaccccagaaagtcttgttctcacgaccccgtcatatgatcggatcctcctccaccttgttgtgcaggaaacggattgactctaatattatgaagcaactgctgtagtcatctcctagctgttgggtcttcctgaataaataaaaccaaaaccataaaaaaatgtaaacatcctaaaaccatgaataatctcttcataagaagaggagaaaaatctctagctcggaaatttgaagagagcaagctttacaagttaatgccctattgttaatcttcaattcacttaatcaactcacttcaatcttattgattaaatcaaatttttatactaataatatcacttacacgaaggcaactaaatgtagcataacttaacacggctggaggttcttaatgcatgacaagctctgttttgaaatgaccaaagttttattagaaacttgggaagaacggcatgggcagaactgcagaagcacttataaaactggagttactatctacttaacaaacctctgattttctgacagacgaagataacaacgaataatgaccttcaaaagacgacatgaaggttgctgaacaagagttaccaccatcgttccgaaaactatatatacttgaaaaaggcgccctgctgaagtacaaatatgtttcataccattttcaaccgacagaatttgttcaactataaaggttccaacctgcagttgggggaacttccattagattacacacaaattttcccattacaattattttgataggcataaaaagaggatcacgagatagtggcaaaaacaaacacgtggcttagcatttacaatgcaccaccaagtacaatgcaagagttaaacaaacgtgttatttaaagatttagatctcaagtatcaaggacggggtatttcaacccatgtaactacaaatactgtgtcgagttgcattttgatacaaccaagaggagtgtttgtatggaaaattataatagtgattcttacttctcgtttgatgagtctctgtcttaatttaaaagtggaacttaccaaagtttgtgattttcaacaaatttcaaccactaatagaatgttaaaaggagtattgctagcactcttctacaaccaaatatgtcaagaagagtttcaacagtcttgtgataaccactaaaaaaatcctactgagtgatgagcaacaaaggtcaaagaagcacctcttcattgagaaaaaaaaannnnnnnnnnnnnnnnnnnnnnnnnnnnnnnnnnnnnnnnnnnnnnnnnnnnnnnnnnnnnnnnnnnnnnnnnnnnnnnnnnnnnnnnnnnnnnnnnnnnnnnnnnnnnnnnnnnnnnnnnnnnnnnnnnnnnnnnnnnnnnnnnnnnnnnnnnnnnnnnnnnnnnnnnnnnnnnnnnnnnnnnnnnnnnnnnnnnnnnnnnnnnnnnnnnnnnnnnnnnnnnnnnnnnnnnnnnnnnnnnnnnnnnnnnnnnnnnnnnnnnnnnnnnnnnnnnnnnnnnnnnnnnnnnnnnnnnnnnnnnnnnnnnnnnnnnnnnnnnnnnnnnnnnnnnnnnnnnnnnnnnnnnnnnnnnnnnnnnnnnnnnnnnnnnnnnnnnnnnnnnnnnnnnnnnnnnnnnnnnnnnnnnnnnnnnnnnnnnnnnnnnnnnnnnnnnnnnnnnnnnnnnnnnnnnnnnnnnnnnnnnnnnnnnnnnnnnnnnnnnnnnnnnnnnnnnnnnnnnnnnnnnnnnnnaaaaaaaaaaaaccaaaaaaaaacaaattaggagcatgtttaattctctctttttataataaaaaattacactactcaacaatgaatgtatcatctaaaatctattaagttttgaagattgtttctgaaacaaacaaaaatgcatcaaagtacaaccaaattttcaagactatacataaaactctaggatttgaaacaaacaggtattctagaaacaaaatattagtcagtatttacggggctattcattaataaaaaatataaaagacaagaaagaataaaaaagcaaaagaaagccatgagttacaaaaggaatatgtaataataccagtaaaagtgctgcaacggtaccaaaagatttcgacaataatggagcaaataagtctcatctaaaatatataaaatattaaccgtgtgagccttgaaacgacgacgcatgtgatatagcatatggaataatggggcgttgtaaatggggtagtggaaggagcctgcgacacatgatatgatctgctttgcatgcaaactaaaacgaccgtttctatcaccgtgcgtgtccctcctaattctttcaactttatcattattaattatatggaaaatgtttattagccttctcttatgaaattaaaagtctaaagttttattgagaaatttaacaatatatttattcttactaaaatctgaaaattttaatacgatgaaggacgaattcaagttggttccaaactctgatggtccaagtgtgtagagtggttacagcaacaaataagttgttgttgataagagagacacgttgttaagtattaatttccagttccgtggacacatgtatatttactataacaaggtgatggatacgtgtacatttattataataggatgatggacatgtgtacaatgcacaataattttactaattttgtgcagtacaatatcctctcataattttcaatacaatttcaatgattaattgatcatacattccgtaccttgctaaaaaactttctattttttattctttatgaatttttgtaagtaacttaatttatattacttcaatcttatgtaattcaattaattttctctctaataatttttatattaataagttgtctaactcacaaatattttacttatatctcctatatttactataaagttaagtaactcgtgaataatagttacttatataaataactctctaatttaaattaattcaatatcacattagaaacactaaaataatatttaatttttttaagtaactctcatcatagatgctctcattattatatagattaaaatcaaatttttaaaaaagaaatggataattgttttattaatgaaataattatcaataataaatataataaaaaataaaaaatacatatgtttgaaatttttaattttgatgaatttaaacatgaatttaattaataaatattaatttttatataagtatacataaaatgtgaaaatgtaaattaaaaagtaaagaattgttgttttattaataataaatataaaataaattattaaatatatgtttaaaannnnnnnnnnattaattgaaaaaataaatattgatacggatagataaggaaattaaaaaaaatgaataaaaaaatgatataaaaaatatgttatgaaatgaaaaaggttaaaggggaaatatttagtgtaaacatttaagaataaaatatataaatttgagtcatataacgttaaataattaagattaaaaattaattaatagtcacatgatgattttaatttttaataaattatctttatttatcttttaacaatgatcatttagatattagctgataattacatttgttaggacaaatgataaaacaaatctttcaaatgttttattgatttatgtgaaggggtttagttcatttgattaaatagagtctttgagttatcgtaaatttttttatacttatcaattttcacgaataaaaagtatattttgaatgatcttatattaagagctaaattgactaaggaaatgagtcataatcattatggagaacatgcatggtccaacaatcttttatatttaataactatagatagtattgtcatgaacttagccgttttagaaccatccatgattggggatcggaactcatggatccatttgcaactccttagaaatattatctgaataatatttctttctcatacttcaaatgctttgtagagtgttcaataaggtgttcttttaatagtttccatacctataagattattaacgatatcctttttagataatgttaataaattccaaaattcattatgtccttcagtcaccactatagtaatgacgactatcttttctattggtaatgtagttgttctttggttaggtattgaaataacattacccattgagaaatccctgtatttttttaacttacaaaattgattcaattttaaaataaaaatagaatgtgatgtgtattgtatatttaaggagaattcttttaaaacaactaatttctaaatacatctatttcattttagatctattctaaacatatgaatttgttctaaatatttaaattacatattttcttattgtaagtttatcaaaagaaagaaataatttctttcaaaagatcatgtgatacacttgttacaaagactagaggtgacagatatagataatacacataaggtcataaccgtaactaggttcgactttaatatgatacacgcacaaaaacttattacgaagaaatgatataatttcttaaacaaggagatagcaaaacacatttttttaaattaattataatttcatgtaacatcttcatactgattttctagttttttttatgaaatattttttctatttttaaatatcaaataaatttattatttataaaatatttggaagactaattaaaagtatcatttcttataaaagagtgaaaaaattaataaaaataacagataaaaaacataaataaattaagaagtaattttaatataaataaaaagatattaataaggacatatattaagtggtctttatatatatatatatatatatatatnnnnnnnnnnnnnnnnnnnnnnnnnnnnnnnnnnnnnnnnnnnnnnnnnnnnnnnnnnnnnnnnnnnnnnnnnnnnnnnnnnnnnnnnnnnnnnnnnnnnnnnnnnnnnnnnnnnnnnnnnnnnnnnnnnnnnnnnnnnnnnnnnnnnnnnnnnnnnnnnnnnnnnnnnnnnnnnnnnnnnnnnnnnnnnnnnnnnnnnnnnnnnnnnnnnnnnnnnnnnnnnnnnnnnnnnnnnnnnnnnnnnnnnnnnnnnnnnnnnnnnnnnnnnnnnatatattcttaactcgtcttctttgttagatataataatgaaacaacctaaaaggaaaataaattactatcccacaagcacaagtgaatgtttacttcattttttcaattaaaaaattcaatcatattattattgtatcaaaaaaaaaaacacattattgaggcaatatattcgacgcatgctgtaatgctcatgcatagatactcacatacacacacatatattcaatgagagcaagatgtcatgtcccacctactcaatgagaacaagatgtagtgacccacctactcaatgagagtaagatgtcgtgaccggcctattgacctacctacccaaacacgcacttttaaaaggaatttgacttagttataaaaaaaaatctggaaggaccggacttggaatgaagtgagacagggtgagagtgaaaggggaggagatagggggtttaggatgggccacccccaaattttattaatataaattttattatatatattaaaaattaaaaattaaaaaagtaatttaataataaaaaagattatattacataatataataagatataatattttttaatattacattaaaaaataagataaaatatttttgaaattgtattacataatataataaaaatctttaaaattacattacataataagataaaatattttttaagattgtattcaaatatagtatataatattttttaatattgtatcaaaaataggataacatataaaatatttttaatatttaattgcataatataaaatatatttaagattgtattacttcgaagcttgcaatagaatccggaatgagccctcttgtccttgttgcttattgacaactcttcgctactgtgtccattgctccctttgcttattggctcgaatggtaattatatatatatatatatatatatatatgtgtataccctttctgattttgttttatttcatatatatacacagttcatgcatgaaagggtttgatcaactttgaaccacctatatcattctcatcacagtgagtgtcaccgttcgatatcccttttgttttgtttgattcaaaagaaaaatgctatatgttgttctgatgattaagtaacggactttccatttatattagacaaaaataatcataagaaaaacagtaacggatatacttagcattcttcttaaataaataaaaaaagaagaaagaagttgttgttctacatgaagttggactttatcatactcaaacgttttctaacggttaatgaaactggtgaaagaaaaacattcatgaatgaggctttttcttgcattgctgagaatctacaaacgaaaaacatgcatgaagaaactgagagaatatcacaaaattagcaacaagacaacaaccataatcaatagtgacacagttaatagggaattaaactgcttgattaaaagttactaaaacacatgttgcacgctttgtcttgttctcatgtgtagagtgtagtttagggtttagggtttaaacaatgaagacgctaacagcatgcgtgagtctttgggcatgttacgtgccagcacctttctattattaagacaaatagtgcaacacgttctcacggagtttcttataaaagggtagggtcatagagttgtagtagcgggtgacttatattgcagtttcattaatggcttgtctcgtacttctacgagaaataatctcggtggaaattgtcaggttcttgttgctgcaggcatattattaactttatttatgaatacacaacaaaggactagactctagagtgagtgaatagagacaagacaaagaataacaaa
